(19) United States
(12) Patent Application Publication
(10) Pub. No.: US 2010/0004213 A1
(43) Pub. Date: Jan. 7, 2010

(54) GENE EXPRESSION MARKERS FOR INFLAMMATORY BOWEL DISEASE

(76) Inventors: Alexander R. Abbas, San Carlos, CA (US); Hilary Clark, San Francisco, CA (US); Lauri Diehl, Los Altos, CA (US); Charles Lees, Linlithgow (GB); Colin L. Noble, Edinburgh (GB); Jack Satsangi, Edinburgh (GB)

Correspondence Address: GOODWIN PROCTER LLP, 135 COMMONWEALTH DRIVE, MENLO PARK, CA, 94025, US

(21) Appl. No.: 12/324,783

(22) Filed: Nov. 26, 2008

Related U.S. Application Data
(60) Provisional application No. 60/991,203, filed on Nov. 29, 2007.
(60) Provisional application No. 61/190,689, filed on Aug. 28, 2008.
(60) Provisional application No. 61/192,268, filed on Sep. 17, 2008.

(51) Int. Cl. A61K 31/606; C12Q 1/68; A61K 31/56; A61P 1/00

(52) U.S. Cl. 514/166; 435/6; 514/178

(57) ABSTRACT

The present invention relates to methods of gene expression profiling for inflammatory bowel disease pathogenesis, in which the differential expression in a test sample from a mammalian subject of one or more IBD markers relative to a control is determined, wherein the differential expression in the lest sample is indicative of an IBD in the mammalian subject from which the lest sample was obtained.

### CROSS-REFERENCE TO RELATED APPLICATIONS

[0001] This application claims priority under Section 119(e) and the benefit of U.S. Provisional Application Ser. No. 60/991,203 filed Nov. 29, 2007, U.S. Provisional Application Ser. No. 61/192,268 filed Sep. 17, 2008, and U.S. Non-provisional application Ser. No. 12/125,724 filed May 22, 2008 the entire disclosures of which are incorporated herein by reference in their entirety.

### BACKGROUND OF THE INVENTION

[0002] 1. Field of the Invention

[0003] The present invention relates to gene expression profiles in inflammatory bowel disease pathogenesis, including use in the detection and diagnosis of inflammatory bowel disease.

[0004] 2. Description of Related Art

[0005] Immune related and inflammatory diseases are the manifestation or consequence of fairly complex, often multiple interconnected biological pathways which in normal physiology are critical to respond to insult or injury, initiate repair from insult or injury, and mount innate and acquired defense against foreign organisms. Disease or pathology occurs when these normal physiological pathways cause additional insult or injury either as directly related to the intensity of the response, as a consequence of abnormal regulation or excessive stimulation, as a reaction to self, or as a combination of these.

[0006] Though the genesis of these diseases often involves multistep pathways and often multiple different biological systems/pathways, intervention at critical points in one or more of these pathways can have an ameliorative or therapeutic effect. Therapeutic intervention can occur by either antagonism of a detrimental process/pathway or stimulation of a beneficial process/pathway.

[0007] Many immune related diseases are known and have been extensively studied. Such diseases include immune-mediated inflammatory diseases, non-immune-mediated inflammatory diseases, infectious diseases, immunodeficiency diseases, neoplasia, etc.

[0008] The term inflammatory bowel disorder (“IBD”) describes a group of chronic inflammatory disorders of unknown causes in which the intestine (bowel) becomes inflamed, often causing recurring cramps or diarrhea. The prevalence of IBD in the US is estimated to be about 200 per 100,000 population. Patients with IBD can be divided into two major groups, those with ulcerative colitis (“UC”) and those with Crohn's disease (“CD”). Both UC and CD are chronic relapsing diseases and are complex clinical entities that occur in genetically susceptible individuals who are exposed to as yet poorly defined environmental stimuli. (Bonen and Cho, Gastroenterology. 2003; 124:521-536; Gaya et al. Lancet. 2006;367:1271-1284).

[0009] Although the cause of IBD remains unknown, several factors such as genetic, infectious and immunologic susceptibility have been implicated. IBD is much more common in Caucasians, especially those of Jewish descent. The chronic inflammatory nature of the condition has prompted an intense search for a possible infectious cause. Although agents have been found which stimulate acute inflammation, none has been found to cause the chronic inflammation associated with IBD. The hypothesis that IBD is an autoimmune disease is supported by the previously mentioned extraintestinal manifestation of IBD as joint arthritis, and the known positive response to IBD by treatment with therapeutic agents such as adrenal glucocorticoids, cyclosporine and azathioprine, which are known to suppress immune response. In addition, the GI tract, more than any other organ of the body, is continuously exposed to potential antigenic substances such as proteins from food, bacterial byproducts (LPS), etc.

[0010] There is sufficient overlap in the diagnostic criteria for UC and CD that it is sometimes impossible to say which a given patient has; however, the type of lesion typically seen is different, as is the localization. UC mostly appears in the colon, proximal to the rectum, and the characteristic lesion is a superficial ulcer of the mucosa; CD can appear anywhere in the bowel, with occasional involvement of stomach, esophagus and duodenum, and the lesions are usually described as extensive linear fissures.

[0011] The current therapy of IBD usually involves the administration of antiinflammatory or immunosuppressive agents, such as sulfasalazine, corticosteroids, 6-mercaptopurine/azathioprine, or cyclosporine, which usually bring only partial results. If anti-inflammatory/immunosuppressive therapies fail, colectomies are the last line of defense. The typical operation for CD not involving the rectum is resection (removal of a diseased segment of bowel) and anastomosis (reconnection) without an ostomy. Sections of the small or large intestine may be removed. About 30% of CD patients will need surgery within the first year after diagnosis. In the subsequent years, the rate is about 5% per year. Unfortunately, CD is characterized by a high rate of recurrence; about 5% of patients need a second surgery each year after initial surgery.

[0012] Refining a diagnosis of inflammatory bowel disease involves evaluating the progression status of the diseases using standard classification criteria. The classification systems used in IBD include the Truelove and Witts Index (Truelove S. C. and Witts, L. J. Br Med J. 1955;2:1041-1048), which classifies colitis as mild, moderate, or severe, as well as Lennard-Jones. (Leonard-Jones J E. Scand J Gastroenterol Suppl 1989;170:2-6) and the simple clinical colitis activity index (SCCAI). (Walmsley et. al. Gut. 1998;43:29-32) These systems track such variables as daily bowel movements, rectal bleeding, temperature, heart rate, hemoglobin levels, erythrocyte sedimentation rate, weight, hematocrit score, and the level of serum albumin.

[0013] In approximately 10-15% of cases, a definitive diagnosis of ulcerative colitis or Crohn's disease cannot be made and such cases are often referred to as “indeterminate colitis.” Two antibody detection tests are available that can help the diagnosis, each of which assays for antibodies in the blood. The antibodies are “perinuclear anti-neutrophil antibody” (pANCA) and “anti-Saccharomyces cervisiae antibody” (ASCA). Most patients with ulcerative colitis have the pANCA antibody but not the ASCA antibody, while most patients with Crohn's disease have the ASCA antibody but not the pANCA antibody. However, these two tests have shortcomings as some patients have neither antibody and some Crohn's disease patients may have only the pANCA antibody. For clinical practice, a reliable test that would indicate the presence and/or progression of an IBD based on molecular markers rather than the measurement of a multitude of variables would be useful for identifying and/or treating individuals with an IBD. Hypothesis free, linkage and association studies have identified genetic loci that have been associated with UC, notably the MHC region on chromosome 6, (Rioux et al. Am J Hum Genet. 2000;66:1863-1870; Stokkers et al. Gut. 1999; 45:395-401; Van Heel et al. Hum Mol Genet. 2004;13:763-770) the IBD2 locus on chromosome 12 (Parkes et al. Am J Hum Genet. 2000;67:1605-1610; Satsangi et al. Nat Genet. 1996;14:199-202) and the IBD5 locus on chromosome 5. (Giallourakis et. al. Am J. Hum Genet. 2003;73:205-211; Palmieri et. al Aliment Pharmacol Ther. 2006;23:497-506; Russell et. al. Gut. 2006;55:1114-1123; Waller et. al. Gut. 2006;55:809-814) Following a UK wide linkage scan identifying a putative loci of association for UC on chromosome 7q, further studies have implicated variants in the ABCB1 (MDR1) gene which is involved in cellular detoxification with UC. (Satsangi et. al. Nat Genet. 1996;14:199-202; Brant et. al. Am J Hum Genet. 2003;73:1282-1292; Ho et. al. Gastroenterology. 2005;128:288-296)

[0014] A complementary approach towards the identification and understanding of the complex gene- gene and gene- environment relationships that result in the chronic intestinal inflammation observed in inflammatory bowel disease (IBD) is microarray gene expression analysis. Microarrays allow a comprehensive picture of gene expression at the tissue and cellular level, thus helping understand the underlying patho-physiological processes. (Stoughton et. al. Annu Rev Biochem. 2005;74:53-82) Microarray analysis was first applied to patients with IBD in 1997, comparing expression of 96 genes in surgical resections of patients with CD to synovial tissue of patients with rheumatoid arthritis. (Heller et. al. Proc Natl Acad Sci U S A. 1997;94:2150-2155) further studies using microarray platforms to interrogate surgical specimens from patients with IBD identified an number of novel genes that were differentially regulated when diseased samples were compared to controls. (Dieckgraefe et. al. Physiol Genomics. 2000;4:1-11; Lawrance et. al. Hum Mol Genet. 2001;10:445-456)

[0015] A complementary approach towards the identification and understanding of the complex gene- gene and gene- environment relationships that result in the chronic intestinal inflammation observed in inflammatory bowel disease (IBD) is microarray gene expression analysis. Microarrays allow a comprehensive picture of gene expression at the tissue and cellular level, thus helping understand the underlying patho-physiological processes. (Stoughton et. al. Annu Rev Biochem. 2005;74:53-82) Microarray analysis was first applied to patients with IBD in 1997, comparing expression of 96 genes in surgical resections of patients with CD to synovial tissue of patients with rheumatoid arthritis. (Heller et. al. Proc Natl Acad Sci U S A. 1997;94:2150-2155) further studies using microarray platforms to interrogate surgical specimens from patients with IBD identified a number of novel genes that were differentially regulated when diseased samples were compared to controls. (Dieckgraefe et. al. Physiol Genomics. 2000;4:1-11; Lawrance et. al. Hum Mol Genet. 2001;10:445-456)

[0016] Endoscopic pinch mucosal biopsies have allowed investigators to microarray tissue from a larger range of patients encompassing those with less severe disease. Langmann et. al. used microarray technology to analyze 22,283 genes in biopsy specimens from macroscopically non affected areas of the colon and terminal ileum. (Langmann et. al. Gastroenterology. 2004;127:26-40) Genes which were involved in cellular detoxification and biotransformation (Pregnane X receptor and MDR1) were significantly downregulated in the colon of patients with UC, however, there was no change in the expression of these genes in the biopsies from patients with CD. Costello and colleagues (Costello et. al. PLoS Med. 2005;2:e199) looked at the expression of 33792 sequences in endoscopic sigmoid colon biopsies obtained from healthy controls, patients with CD and UC. A number of sequences representing novel proteins were differentially regulated and in silica analysis suggested that these proteins had putative functions related to disease pathogenesis transcription factors, signaling molecules and cell adhesion.

[0017] In a study of patients with UC, Okahara et al. (Aliment Pharmacol Ther. 2005;21:1091-1097) observed that (migration inhibitory factor-related protein 14 (MRP14), growth-related oncogene gamma (GROγ) and serum amyloid A1 (SAA1) were upregulated where as TIMP1 and elfin were down regulated in the inflamed biopsies when compared to the non-inflamed biopsies. When observing 41 chemokines and 21 chemokine receptors, Puleston et al demonstrated that chemokines CXCLs 1-3 and 8 and CCL20 were upregulated in active colonic CD and UC. (Aliment Pharmacol Ther. 2005;21:109-120) Overall these studies illustrate the heterogeneity of early microarray platforms and tissue collection. However, despite these problems differential expression of a number of genes was consistently observed.

[0018] Despite the above identified advances in IBD research, there is a great need for additional diagnostic and therapeutic agents capable of detecting IBD in a mammal and for effectively treating this disorder. Accordingly, the present invention provides polynucleotides and polypeptides that are overexpressed in IBD as compared to normal tissue, and methods of using those polypeptides, and their encoding nucleic acids, for to detect or diagnose the presence of an IBD in mammalian subjects and subsequently to treat those subjects in which an IBD is detected with suitable IBD therapeutic agents.

[0019] The present invention provides methods for detecting the presence of and determining the progression of inflammatory bowel disease (IBD), including ulcerative colitis (UC) and Crohn's disease (CD).

[0020] The invention disclosed herein provides methods and assays examining expression of one or more gene expression markers in a mammalian tissue or cell sample, wherein the expression of one or more such biomarkers is predictive of whether the mammalian subject from which the tissue or cell sample was taken is more likely to have an IBD. In various embodiments of the invention, the methods and assays examine the expression of gene expression markers such as those listed in Tables 1, 2, and 3 and determine whether expression is higher or lower than a control sample.

[0021] These and further embodiments of the present invention will be apparent to those of ordinary skill in the art.

### SUMMARY OF THE INVENTION

[0022] In one aspect, the invention concerns a method of detecting or diagnosing an inflammatory bowel disease (IBD) in a mammalian subject comprising determining, in a biological sample obtained from the subject, that expression levels of (i) one or more nucleic acids encoding one or more polypeptides selected from Tables 1, 2, or 3, or (ii) RNA transcripts or their expression products of one or more genes selected from Tables 1, 2, or 3, is different relative to the expression level in a control, wherein the difference in expression indicates the subject is more likely to have an IBD.

[0023] In one embodiment, the methods of diagnosing or detecting the presence of an IBD in a mammalian subject comprise determining that the expression level of (i) one or more nucleic acids encoding one or more polypeptides selected from Tables IA, 2, or 3A: or (ii) RNA transcripts or expression products thereof of one or more genes selected from Tables IA, 2 or 3 A in a test sample obtained from the subject is higher relative to the level of expression in a control, wherein the higher level of expression is indicative of the presence of an IBD in the subject from which the test sample was obtained.

[0024] In another embodiment, the methods of diagnosing or detecting the presence of an IBD in a mammalian subject comprise determining that the expression level of (i) one or more nucleic acids encoding one or more polypeptides selected from Tables 1B or 3B; or (ii) RNA transcripts or expression products thereof of one or more genes selected from Tables 1B or 3B in a test sample obtained from the subject is lower relative to the level of expression in a control, wherein the lower level of expression is indicative of the presence of an IBD in the subject from which the lest sample was obtained.

[0025] In one aspect, the methods are directed to diagnosing or detecting a flare-up of an IBD in mammalian subject that was previously diagnosed with an IBD and is currently in remission. The subject may have completed treatment for the IBD or is currently undergoing treatment for the IBD. In one embodiment, the methods comprise determining, in a biological sample obtained from the mammalian subject, that the expression level of (i) one or more nucleic acids encoding one or more polypeptides selected from Tables 1, 2, or 3; or (ii) RNA transcripts or expression products thereof of one or more genes selected from Tables 1, 2 or 3 is different relative to the expression level in a control, wherein the difference in expression indicates the subject is more likely to have an IBD flareup. Alternatively, the test sample may be compared to a prior test sample of the mammalian subject, if available, obtained before, after, or at the time of the intial IBD diagnosis.

[0026] In all aspects, the mammalian subject preferably is a human patient, such as a human patient diagnosed with or at risk of developing an IBD. The subject may also be an IBD patient who has received prior treatment for an IBD but is at risk of a recurrence of the IBD.

[0027] For all aspects of the method of the invention, determining the expression level of one or more genes described herein (or one or more nucleic acids encoding polypeptide(s) expressed by one or more of such genes) may be obtained, for example, by a method of gene expression profiling. The method of gene expression profiling may be, for example, a PCR-based method.

[0028] In various embodiments, the diagnosis includes quantification of the expression level of (i) one or more nucleic acids encoding one or more polypeptides selected from Tables 1, 2, or 3; or (ii) RNA transcripts or expression products thereof of one or more genes selected from Tables 1, 2 or 3, such as by immunohistochemistry (IHC) and/or fluorescence in situ hybridization (FISH).

[0029] For all aspects of the invention, the expression levels of the genes may be normalized relative to the expression levels of one or more reference genes, or their expression products.

[0030] For all aspects of the invention, the method may further comprise determining evidence of the expression levels of at least two, three, four, five, six, seven, eight, nine, ten, eleven, twelve, thirteen, fourteen, fifteen, sixteen, seventeen, eighteen, nineteen, or twenty of said genes, or their expression products.

[0031] In another aspect, the methods of present invention also contemplate the use of a “panel” of such genes (i.e. IBD markers as disclosed herein) based on the evidence of their level of expression. In some embodiments, the panel of IBD markers will include at least one, two, three, four, five, six, seven, eight, nine, ten, eleven, twelve, thirteen, fourteen, fifteen, sixteen, seventeen, eighteen, nineteen or twenty IBD markers. The panel may include an IBD marker that is overexpressed in IBD relative to a control, an IBD marker that is underexpressed in IBD relative to a control, or IBD markers that are both overexpressed and underexpressed in IBD relative to a control. Such panels may be used to screen a mammalian subject for the differential expression of one or more IBD markers in order to make a determination on whether an IBD is present in the subject.

[0032] In one embodiment, the IBD markers that make up the panel are selected from Tables 1, 2, and 3. In a preferred embodiment, the methods of diagnosing or detecting the presence of an IBD in a mammalian subject comprise determining a differential expression level of RNA transcripts or expression products thereof from a panel of IBD markers in a test sample obtained from the subject relative to the level of expression in a control, wherein the differential level of expression is indicative of the presence of an IBD in the subject from which the test sample was obtained. The differential expression in the test sample may be higher and/or lower relative to a control as discussed herein.

[0033] For all aspects of the invention, the method may further comprise the step of creating a report summarizing said prediction.

[0034] For all aspects, the IBD diagnosed or detected according to the methods of the present invention is Crohn's disease (CD), ulcerative colitis (UC), or both CD and UC.

[0035] For all aspects of the invention, the test sample obtained from a mammalian subject may be derived from a colonic tissue biopsy. In a preferred embodiment, the biopsy is a tissue selected from the group consisting of terminal ileum, the ascending colon, the descending colon, and the sigmoid colon. In other preferred embodiments, the biopsy is from an inflamed colonic area or from a non-inflamed colonic area. The inflamed colonic area may be acutely inflamed or chronically inflamed.

[0036] For all aspects, determination of expression levels may occur al more than one time. For all aspects of the invention, the determination of expression levels may occur before die patient is subjected to any therapy before and/or after any surgery. In some embodiments, the determining step is indicative of a recurrence of an IBD in the mammalian subject following surgery or indicative of a flare-up of said IBD in said mammalian subject. In a preferred embodiment, the IBD is Crohn's disease.

[0037] In another aspect, the present invention concerns methods of treating a mammalian subject in which the presence of an IBD has been detected by the methods described herein. For example, following a determination that a test sample obtained from the mammalian subject exhibits differential expression relative to a control of one or more of the RNA transcripts or the corresponding gene products of an IBD marker described herein, the mammalian subject may be administered an IBD therapeutic agent.

[0038] In one embodiment, the methods of treating an IBD in a mammalian subject in need thereof, comprise (a) determining a differential level of expression of (i) one or more nucleic acids encoding one or more polypeptides selected from Tables 1, 2, or 3; or (ii) RNA transcripts or expression products thereof of one or more genes selected from “Tables 1, 2 or 3 in a test sample obtained from said subject relative to the level of expression in a control, wherein said differential level of expression is indicative of the presence of an IBD in the subject from which the lest sample was obtained; and (b) administering to said subject an effective amount of an IBD therapeutic agent. In a preferred embodiment, the methods of treating an IBD comprise (a) determining that the expression level of (i) one or more nucleic acids encoding one or more polypeptides selected from Tables IA, 2, or 3A; or (ii) RNA transcripts or expression products thereof of one or more genes selected from Tables IA, 2 or 3A in a test sample obtained from the subject is higher relative to the level of expression in a control, wherein the higher level of expression is indicative of the presence of an IBD in the subject from which the test sample was obtained; and (b) administering to said subject an effective amount of an IBD therapeutic agent. In another preferred embodiment, the methods of treating an IBD comprise (a) determining that the expression level of (i) one or more nucleic acids encoding one or more polypeptides selected from Tables 1B or 3B; or (ii) RNA transcripts or expression products thereof of one or more genes selected from “Tables 1B or 3B in a test sample obtained from the subject is lower relative to the level of expression in a control, wherein the lower level of expression is indicative of the presence of an IBD in the subject from which the test sample was obtained. In some preferred embodiments, the IBD therapeutic agent is one or more of an aminosalicylate, a corticosteroid, and an immunosuppressive agent.

[0039] In one aspect, the panel of IBD markers discussed above is useful in methods of treating an IBD in a mammalian subject. In one embodiment, the mammalian subject is screened against the panel of markers and if the presence of an IBD is determined, IBD therapeutic agent(s) may be administered as discussed herein.

[0040] In a different aspect the invention concerns a kit comprising one or more of (1) extraction buffer/reagents and protocol; (2) reverse transcription buffer/reagents and protocol; and (3) qPCR buffer/reagents and protocol suitable for performing the methods of this invention. The kit may comprise data retrieval and analysis software.

[0041] In one embodiment, the gene whose differential expression is indicative of an IBD is GLI1. In another embodiment, the GLI1 gene is a GLI1 variant. In a preferred embodiment, the GLI1 variant is rs2228226C→G (Q1100E) as described in Example 4.

[0042] All publications mentioned herein are incorporated herein by reference to disclose and describe the methods and/or materials in connection with which the publications are cited. Publications cited herein are cited for their disclosure prior to the filing date of the present application. Nothing here is to be construed as an admission that the inventors are not entitled to antedate the publications by virtue of an earlier priority date or prior date of invention. Further the actual publication dates may be different from those shown and require independent verification.

### BRIEF DESCRIPTION OF DRAWINGS

[0043] FIG. 1 shows the histologically normal biopsies from control patients that were analysed by unsupervised hierarchical clustering.

[0044] FIG. 2 shows the expression of defensins alpha 5 and 6 in ulcerative colitis patients and controls.

[0045] FIG. 3 shows the expression of the matrix metalloproteinases (MMPs) 3 and 7 in ulcerative colitis and controls.

[0046] FIG. 4 shows the real time PCR expression of SAA1, IL-8, defensin alpha 5, and defensin alpha 6 in control and ulcerative colitis inflamed and non-inflamed sigmoid colon biopsies.

[0047] FIG. 5 shows the real time PCR expression of MMP3, MMP7, S100A8, and TLR4 in control and ulcerative colitis inflamed and non-inflamed sigmoid colon biopsies.

[0048] FIG. 6 shows in situ hybridization of defensin alpha 5 in the terminal ileum and colon of patients with ulcerative colitis and controls.

[0049] FIG. 7 shows in situ hybridization of defensin alpha 6 in the terminal ileum and colon of patients with ulcerative colitis and controls.

[0050] FIGS. 8A and 8B depict the nucleic acid sequence (SEQ ID NO:1) encoding human DEFA6 polypeptide and the amino acid sequence of human DEFA6 polypeptide (SEQ ID NO:2).

[0051] FIGS. 9A and 9B depict the nucleic acid sequence (SEQ ID NO:3) encoding human DEFA5 polypeptide and the amino acid sequence of human DEFA5 polypeptide (SEQ ID NO:4). FIGS. 9C and 9D depict the nucleic acid sequence (SEQ ID NO:210) encoding human DEFB14 polypeptide and the amino acid sequence of human DEFB14 polypeptide (SEQ ID NO:211).

[0052] FIGS. 10A and 10B depict the nucleic acid sequence (SEQ ID NO:5) encoding human IL3RA polypeptide and the amino acid sequence of human IL3RA polypeptide (SEQ ID NO:6).

[0053] FIGS. 11A and 11B depict the nucleic acid sequence (SEQ ID NO:7) encoding human IL2RA polypeptide and the amino acid sequence of human IL2RA polypeptide (SEQ ID NO:8).

[0054] FIGS. 12A and 12B depict the nucleic acid sequence (SEQ ID NO:9) encoding human REG3G polypeptide and the amino acid sequence of human REG3G polypeptide (SEQ ID NO:10).

[0055] FIGS. 13A and 13B depict the nucleic acid sequence (SEQ ID NO:11) encoding human REG1B polypeptide and the amino acid sequence of human REG1B polypeptide (SEQ ID NO:12).

[0056] FIGS. 14A and 14B depict the nucleic acid sequence (SEQ ID NO:13) encoding human KCND3 polypeptide and the amino acid sequence of human KCND3 polypeptide (SEQ ID NO:14).

[0057] FIGS. 15A and 15B depict the nucleic acid sequence (SEQ ID NO:15) encoding human MIP-3a polypeptide and the amino acid sequence of human MIP-3a polypeptide (SEQ ID NO:16).

[0058] FIGS. 16A and 16B depict the nucleic acid sequence (SEQ ID NO:17) encoding human ECGF1 polypeptide and the amino acid sequence of human ECGF1 polypeptide (SEQ ID NO:18).

[0059] FIGS. 17A and 17B depict the nucleic acid sequence (SEQ ID NO:19) encoding human IL1B polypeptide and the amino acid sequence of human IL1B polypeptide (SEQ ID NO:20).

[0060] FIGS. 18A and 18B depict the nucleic acid sequence (SEQ ID NO:21) encoding human MIP2BGRO-g polypeptide and the amino acid sequence of human MIP2BGRO-g polypeptide (SEQ ID NO:22).

[0061] FIGS. 19A and 19B depict the nucleic acid sequence (SEQ ID NO:23) encoding human CXCL1 polypeptide and the amino acid sequence of human CXCL1 polypeptide (SEQ ID NO:24).

[0062] FIGS. 20A and 20B depict the nucleic acid sequence (SEQ ID NO:25) encoding human IAP1 polypeptide and the amino acid sequence of human IAP1 polypeptide (SEQ ID NO:26).

[0063] FIGS. 21A and 21B depict the nucleic acid sequence (SEQ ID NO:27) encoding human CASP5 polypeptide and the amino acid sequence of human CASP5 polypeptide (SEQ ID NO:28).

[0064] FIGS. 22A and 22B depict the nucleic acid sequence (SEQ ID NO:29) encoding human DMBT1 polypeptide and the amino acid sequence of human DMBT1 polypeptide (SEQ ID NO:30).

[0065] FIGS. 23A and 23B depict the nucleic acid sequence (SEQ ID NO:31) encoding human PCDH17 polypeptide and the amino acid sequence of human PCDI117 polypeptide (SEQ ID NO:32).

[0066] FIGS. 24A and 24B depict the nucleic acid sequence (SEQ ID NO:33) encoding human IFITM1 polypeptide and the amino acid sequence of human IFITM1 polypeptide (SEQ ID NO:34).

[0067] FIGS. 25A and 25B depict the nucleic acid sequence (SEQ ID NO:35) encoding human PDZK1IP1 polypeptide and the amino acid sequence of human PDZK1IP1 polypeptide (SEQ ID NO:36).

[0068] FIGS. 26A and 26B depict the nucleic acid sequence (SEQ ID NO:37) encoding human IRTA2 polypeptide and the amino acid sequence of human IRTA2 polypeptide (SEQ ID NO:38).

[0069] FIGS. 27A and 27B depict the nucleic acid sequence (SEQ ID NO:39) encoding human SLC40A1 polypeptide and the amino acid sequence of human SLC40A1 polypeptide (SEQ ID NO:40).

[0070] FIGS. 28A and 28B depict the nucleic acid sequence (SEQ ID NO:41) encoding human IGHV4-4 polypeptide and the amino acid sequence of human IGHV4-4 polypeptide (SEQ ID NO:42).

[0071] FIGS. 29A and 29B depict the nucleic acid sequence (SEQ ID NO:43) encoding human REG3G polypeptide and the amino acid sequence of human REG3G polypeptide (SEQ ID NO:44).

[0072] FIGS. 30A and 30B depict the nucleic acid sequence (SEQ ID NO:45) encoding human AQP9 polypeptide and the amino acid sequence of human AQP9 polypeptide (SEQ ID NO:46).

[0073] FIGS. 31A and 31B depict the nucleic acid sequence (SEQ ID NO:47) encoding human OLFM4 polypeptide and the amino acid sequence of human OLFM4 polypeptide (SEQ ID NO:48).

[0074] FIGS. 32A and 32B depict the nucleic acid sequence (SEQ ID NO:49) encoding human S100A9 polypeptide and the amino acid sequence of human S100A9 polypeptide (SEQ ID NO:50).

[0075] FIGS. 33A and 33B depict the nucleic acid sequence (SEQ ID NO:51) encoding human UNC5CL polypeptide and the amino acid sequence of human UNC5CL polypeptide (SEQ ID NO:52).

[0076] FIGS. 34A and 34B depict the nucleic acid sequence (SEQ ID NO:53) encoding human GPR110 polypeptide and the amino acid sequence of human GPR110 polypeptide (SEQ ID NO:54).

[0077] FIGS. 35A and 35B depict the nucleic acid sequence (SEQ ID NO:55) encoding human HLA-G polypeptide and the amino acid sequence of human HLA-G polypeptide (SEQ ID NO:56).

[0078] FIGS. 36A and 36B depict the nucleic acid sequence (SEQ ID NO:57) encoding human TAP1 polypeptide and the amino acid sequence of human TAP1 polypeptide (SEQ ID NO:58).

[0079] FIGS. 37A and 37B depict the nucleic acid sequence (SEQ ID NO:59) encoding human MAP3K8 polypeptide and the amino acid sequence of human MAP3K8 polypeptide (SEQ ID NO:60).

[0080] FIGS. 38A and 38B depict the nucleic acid sequence (SEQ ID NO:61) encoding human UBD|GABBR1polypeptide and the amino acid sequence of human UBD|GABBR1 polypeptide (SEQ ID NO:62).

[0081] FIGS. 39A and 39B depict the nucleic acid sequence (SEQ ID NO:63) encoding human DHX57 polypeptide and the amino acid sequence of human DHX57 polypeptide (SEQ ID NO:64).

[0082] FIGS. 40A and 40B depict the nucleic acid sequence (SEQ ID NO:65) encoding human MA polypeptide and the amino acid sequence of human MApolypeptide (SEQ ID NO:66).

[0083] FIGS. 41A and 41B depict the nucleic acid sequence (SEQ ID NO:67) encoding human IGLJCOR18 polypeptide and the amino acid sequence of human IGLJCOR18 polypeptide (SEQ ID NO:68).

[0084] FIGS. 42A and 42B depict the nucleic acid sequence (SEQ ID NO:69) encoding human HLA-G polypeptide and the amino acid sequence of human HLA-G polypeptide (SEQ ID NO:70).

[0085] FIGS. 43A and 43B depict the nucleic acid sequence (SEQ ID NO:71) encoding human SAA1 polypeptide and the amino acid sequence of human SAA1 polypeptide (SEQ ID NO:72).

[0086] FIGS. 44A and 44B depict the nucleic acid sequence (SEQ ID NO:73) encoding human TAP2 polypeptide and the amino acid sequence of human TAP2 polypeptide (SEQ ID NO:74).

[0087] FIGS. 45A and 45B depict the nucleic acid sequence (SEQ ID NO:75) encoding human PCAA17448 polypeptide and the amino acid sequence of human PCAA17448 polypeptide (SEQ ID NO:76).

[0088] FIGS. 46A and 46B depict the nucleic acid sequence (SEQ ID NO:77) encoding human LCN2 polypeptide and the amino acid sequence of human LCN2 polypeptide (SEQ ID NO:78).

[0089] FIGS. 47A and 47B depict the nucleic acid sequence (SEQ ID NO:79) encoding human ZBP1 polypeptide and the amino acid sequence of human ZBP1 polypeptide (SEQ ID NO:80).

[0090] FIGS. 48A and 48B depict the nucleic acid sequence (SEQ ID NO:81) encoding human TNIP3 polypeptide and the amino acid sequence of human TNIP3 polypeptide (SEQ ID NO:82).

[0091] FIGS. 49A and 49B depict the nucleic acid sequence (SEQ ID NO:83) encoding human ZC3H12A polypeptide and the amino acid sequence of human ZC3H12A polypeptide (SEQ ID NO:84).

[0092] FIGS. 50A and 50B depict the nucleic acid sequence (SEQ ID NO:85) encoding human CH13E1 polypeptide and the amino acid sequence of human CHI3L1 polypeptide (SEQ ID NO:86).

[0093] FIGS. 51A and 51B depict the nucleic acid sequence (SEQ ID NO:87) encoding human FCGR3A polypeptide and the amino acid sequence of human FCGR3A polypeptide (SEQ ID NO:88).

[0094] FIGS. 52A and 52B depict the nucleic acid sequence (SEQ ID NO:89) encoding human SAMD9L polypeptide and the amino acid sequence of human SAMD9L polypeptide (SEQ ID NO:90).

[0095] FIGS. 53A and 53B depict the nucleic acid sequence (SEQ ID NO:91) encoding human MMP9 polypeptide and the amino acid sequence of human MMP9 polypeptide (SEQ ID NO:92).

[0096] FIGS. 54A and 54B depict the nucleic acid sequence (SEQ ID NO:93) encoding human MMP7 polypeptide and the amino acid sequence of human MMP7 polypeptide (SEQ ID NO:94).

[0097] FIGS. 55A and 55B depict the nucleic acid sequence (SEQ ID NO:95) encoding human BF polypeptide and the amino acid sequence of human BF polypeptide (SEQ ID NO:96).

[0098] FIGS. 56A and 56B depict the nucleic acid sequence (SEQ ID NO:97) encoding human S100P polypeptide and the amino acid sequence of human S100P polypeptide (SEQ ID NO:98).

[0099] FIGS. 57A and 57B depict the nucleic acid sequence (SEQ ID NO:99) encoding human GRO polypeptide and the amino acid sequence of human GRO polypeptide (SEQ ID NO:100).

[0100] FIGS. 58A and 58B depict the nucleic acid sequence (SEQ ID NO:101) encoding human INDO polypeptide and the amino acid sequence of human INDO polypeptide (SEQ ID NO:102).

[0101] FIGS. 59A and 59B depict the nucleic acid sequence (SEQ ID NO:103) encoding human TRIM22 polypeptide and the amino acid sequence of human TRIM22 polypeptide (SEQ ID NO:104).

[0102] FIGS. 60A and 60B depict the nucleic acid sequence (SEQ ID NO:105) encoding human SAA2 polypeptide and the amino acid sequence of human SAA2 polypeptide (SEQ ID NO:106).

[0103] FIGS. 61A and 61B depict the nucleic acid sequence (SEQ ID NO:107) encoding human NEU4 polypeptide and the amino acid sequence of human NEU4 polypeptide (SEQ ID NO:108).

[0104] FIGS. 62A and 62B depict the nucleic acid sequence (SEQ ID NO:109) encoding human IRTA2/FCRH5 polypeptide and the amino acid sequence of human IRTA2/FCRH5 polypeptide (SEQ ID NO:110).

[0105] FIGS. 63A and 63B depict the nucleic acid sequence (SEQ ID NO:111) encoding human IGLJCOR18 polypeptide and the amino acid sequence of human IGLJCOR18 polypeptide (SEQ ID NO:112).

[0106] FIGS. 64A and 64B depict the nucleic acid sequence (SEQ ID NO:113) encoding human IGHV4-4 polypeptide and the amino acid sequence of human IGHV4-4 polypeptide (SEQ ID NO:114).

[0107] FIGS. 65A and 65B depict the nucleic acid sequence (SEQ ID NO:115) encoding human MMP9 polypeptide and the amino acid sequence of human MMP9 polypeptide (SEQ ID NO:116).

[0108] FIGS. 66A and 66B depict the nucleic acid sequence (SEQ ID NO:117) encoding human GRO polypeptide and the amino acid sequence of human GRO polypeptide (SEQ ID NO:118).

[0109] FIGS. 67A and 67B depict the nucleic acid sequence (SEQ ID NO:119) encoding human MIP2BGRO-g polypeptide and the amino acid sequence of human MIP2BGRO-g polypeptide (SEQ ID NO:120).

[0110] FIGS. 68A and 68B depict the nucleic acid sequence (SEQ ID NO:121) encoding human IL1B polypeptide and the amino acid sequence of human IL1B polypeptide (SEQ ID NO:122).

[0111] FIGS. 69A and 69B depict the nucleic acid sequence (SEQ ID NO:123) encoding human IL3RA polypeptide and the amino acid sequence of human IL3RA polypeptide (SEQ ID NO:124).

[0112] FIGS. 70A and 70B depict the nucleic acid sequence (SEQ ID NO:125) encoding human CASP1 polypeptide and the ammo acid sequence of human CASP1 polypeptide (SEQ ID NO:126).

[0113] FIGS. 71A and 71B depict the nucleic acid sequence (SEQ ID NO:127) encoding human BV8 polypeptide and the amino acid sequence of human BV8 polypeptide (SEQ ID NO:128).

[0114] FIGS. 72A and 72B depict the nucleic acid sequence (SEQ ID NO:129) encoding human HDAC7A polypeptide and the amino acid sequence of human HDAC7A polypeptide (SEQ ID NO:130).

[0115] FIGS. 73A and 73B depict the nucleic acid sequence (SEQ ID NO:131) encoding human ACVRL1 polypeptide and the amino acid sequence of human ACVRL1 polypeptide (SEQ ID NO:132).

[0116] FIGS. 74A and 74B depict the nucleic acid sequence (SEQ ID NO:133) encoding human NR4A1 polypeptide and the amino acid sequence of human NR4A1 polypeptide (SEQ ID NO:134).

[0117] FIGS. 75A and 75B depict the nucleic acid sequence (SEQ ID NO:135) encoding human K5B polypeptide and the amino acid sequence of human K5B polypeptide (SEQ ID NO:136).

[0118] FIGS. 76A and 76B depict the nucleic acid sequence (SEQ ID NO:137) encoding human SILV polypeptide and the amino acid sequence of human SILV polypeptide (SEQ ID NO:138).

[0119] FIGS. 77A and 77B depict the nucleic acid sequence (SEQ ID NO:139) encoding human IRAK3 polypeptide and the amino acid sequence of human IRAK3 polypeptide (SEQ ID NO:140).

[0120] FIGS. 78A and 78B depict the nucleic acid sequence (SEQ ID NO:141) encoding human IL-4 polypeptide and the amino acid sequence of human IL-4 polypeptide (SEQ ID NO:142).

[0121] FIGS. 79A and 79B depict the nucleic acid sequence (SEQ ID NO:143) encoding human IL-13 polypeptide and the amino acid sequence of human IL-13 polypeptide (SEQ ID NO:144).

[0122] FIGS. 80A and 80B depict the nucleic acid sequence (SEQ ID NO:145) encoding human RAD50 polypeptide and the amino acid sequence of human RAD50 polypeptide (SEQ ID NO:146).

[0123] FIGS. 81A and 81B depict the nucleic acid sequence (SEQ ID NO:147) encoding human IL5 polypeptide and the amino acid sequence of human IL-5 polypeptide (SEQ ID NO:148).

[0124] FIGS. 82A and 82B depict the nucleic acid sequence (SEQ ID NO:149) encoding human IRF1 polypeptide and the amino acid sequence of human IRF1 polypeptide (SEQ ID NO:150).

[0125] FIGS. 83A and 83B depict the nucleic acid sequence (SEQ ID NO:151) encoding human PDLIM4 polypeptide and the amino acid sequence of human PDLIM4 polypeptide (SEQ ID NO:152).

[0126] FIGS. 84A and 84B depict the nucleic acid sequence (SEQ ID NO:153) encoding human CSF2 polypeptide and the amino acid sequence of human CSF2 polypeptide (SEQ ID NO:154).

[0127] FIGS. 85A and 85B depict the nucleic acid sequence (SEQ ID NO:155) encoding human IL-3 polypeptide and the amino acid sequence of human IL-3 polypeptide (SEQ ID NO:156).

[0128] FIGS. 86A and 86B depict the nucleic acid sequence (SEQ ID NO:157) encoding human MMP3 polypeptide and the amino acid sequence of human MMP3 polypeptide (SEQ ID NO:158).

[0129] FIGS. 87A and 87B depict the nucleic acid sequence (SEQ ID NO:159) encoding human IL-8 polypeptide and the amino acid sequence of human IL-8 polypeptide (SEQ ID NO:160).

[0130] FIGS. 88A and 88B depict the nucleic acid sequence (SEQ ID NO:161) encoding human TLR4 polypeptide and the amino acid sequence of human TLR4 polypeptide (SEQ ID NO:162).

[0131] FIGS. 89A and 89B depict the nucleic acid sequence (SEQ ID NO:163) encoding human HLA-DRB1 polypeptide and the amino acid sequence of human HLA-DRB1 polypeptide (SEQ ID NO:164).

[0132] FIGS. 90A and 90B depict the nucleic acid sequence (SEQ ID NO:165) encoding human MMP19 polypeptide and the amino acid sequence of human MMP19 polypeptide (SEQ ID NO:166).

[0133] FIGS. 91A and 91B depict the nucleic acid sequence (SEQ ID NO:167) encoding human TIMP1 polypeptide and the amino acid sequence of human TIMP1 polypeptide (SEQ ID NO:168).

[0134] FIGS. 92A and 92B depict the nucleic acid sequence (SEQ ID NO:169) encoding human Elfin polypeptide and the amino acid sequence of human Elfin polypeptide (SEQ ID NO:170).

[0135] FIGS. 93A and 93B depict the nucleic acid sequence (SEQ ID NO:171) encoding human CXCL1 polypeptide and the amino acid sequence of human CXCL1 polypeptide (SEQ ID NO:172).

[0136] FIGS. 94A and 94B depict the nucleic acid sequence (SEQ ID NO:173) encoding human DKFZP586A0522 polypeptide and the amino acid sequence of human DFKZP586A0522 polypeptide (SEQ ID NO:174).

[0137] FIGS. 95A and 95B depict the nucleic acid sequence (SEQ ID NO:175) encoding human SLC39A5 polypeptide and the amino acid sequence of human SLC39A5 polypeptide (SEQ ID NO:176).

[0138] FIGS. 96A and 96B depict the nucleic acid sequence (SEQ ID NO:177) encoding human GLI-1 polypeptide and the amino acid sequence of human GLI-1 polypeptide (SEQ ID NO:178).

[0139] FIGS. 97A and 97B depict the nucleic acid sequence (SEQ ID NO:179) encoding human HMGA2 polypeptide and the amino acid sequence of human HMGA2 polypeptide (SEQ ID NO:180).

[0140] FIGS. 98A and 98B depict the nucleic acid sequence (SEQ ID NO:181) encoding human SLC22A5 polypeptide and the amino acid sequence of human SLC22A5 polypeptide (SEQ ID NO:182).

[0141] FIGS. 99A and 99B depict the nucleic acid sequence (SEQ ID NO:183) encoding human SLC22A4 polypeptide and the amino acid sequence of human SLC22A4 polypeptide (SEQ ID NO:184).

[0142] FIGS. 100A and 100B depict the nucleic acid sequence (SEQ ID NO:185) encoding human P4HA2 polypeptide and the amino acid sequence of human P4HA2 polypeptide (SEQ ID NO:186).

[0143] FIGS. 101A and 101B depict the nucleic acid sequence (SEQ ID NO:187) encoding human TSLP polypeptide and the amino acid sequence of human TSLP polypeptide (SEQ ID NO:188).

[0144] FIGS. 102A and 102B depict the nucleic acid sequence (SEQ ID NO:189) encoding human tubulin alpha 5/alpha 3 polypeptide and the amino acid sequence of human tubulin alpha 5/alpha 3 polypeptide (SEQ ID NO:190).

[0145] FIGS. 103A and 103B depict the nucleic acid sequence (SEQ ID NO:191) encoding human tubulin alpha 6 polypeptide and the amino acid sequence of human tubulin alpha 6 polypeptide (SEQ ID NO:192).

[0146] FIG. 104 shows a meta-analysis of non-synonymous GLI1 SNP rs2228226 in Scotland, Cambridge and Sweden using Mantel-Haenszel method.

[0147] FIG. 105 shows Q1100H disrupts a conserved region of the GLI1 protein and reduces GLI1 transcriptional activity.

[0148] FIG. 106 shows expression of hedgehog (HH) signalling components in the healthy human adult colon (HC) and ulcerative colitis (UC).

[0149] FIG. 107 shows the results in which Gli1± animals show mortality, severe clinical symptoms, and profound weight loss after DSS treatment.

[0150] FIG. 108 shows Gli1± animals demonstrate more severe intestinal inflammation than WT littermates in response to DSS treatment.

[0151] FIG. 109 shows cytokine analysis of Gli1± and WT mice after DSS treatments demonstrates robust pro-inflammatory cytokine activation.

[0152] FIG. 110A-B shows the (A) nucleic acid sequence encoding human arrestin domain containing 5 (ARRDC5) (HOC342959) and the (B) amino acid sequence of human ARRDC5 polypeptide.

[0153] FIG. 111 shows the nucleic acid sequence corresponding to human ataxin 3-like (ATXN3L).

[0154] FIG. 112A-B shows the (A) nucleic acid sequence encoding human follicle stimulating hormone receptor (FSHR) (LOC92552) and (B) the amino acid sequence of human FSHR polypeptide.

[0155] FIG. 113A-B shows the (A) nucleic acid sequence encoding human Platelet-derived growth factor receptor, alpha polypeptide (PDGFRA) and (B) the amino acid sequence of human PDGFRA polypeptide.

[0156] FIG. 114A-B shows the (A) nucleic acid sequence encoding human transforming growth factor beta 3 (TGFB3) and (B) the amino acid sequence of human TGFB3 polypeptide.

[0157] FIG. 115A-B shows the (A) nucleic acid sequence encoding human potassium channel tetramerisation domain containing 8 (KCTD8) and (B) the amino acid sequence of human KCTD8 polypeptide.

[0158] FIG. 116A-B shows the (A) nucleic acid sequence encoding human transglutaminase 4 (TGM4) and (B) the amino acid sequence of human TGM4 polypeptide.

[0159] FIG. 117A-B shows the (A) nucleic acid sequence encoding human TPD52L3 tumor protein D52-like 3 (NYD-SP25) and (B) the amino acid sequence of human NYD-SP25 polypeptide.

[0160] FIG. 118 shows the nucleic acid sequence corresponding to misc_RNA (C3orf53), FLJ33651.

[0161] FIG. 119 shows the nucleic acid sequence corresponding to EMX2 opposite strand (non-protein coding) (EMX2OS) on chromosome 10.

[0162] FIG. 120A-B shows the (A) nucleic acid sequence encoding human wingless-type MMTV integration site family, member 16 (WNT16) and (B) the amino acid sequence of human WNT16 polypeptide.

[0163] FIG. 121A-C shows the (A-B) nucleic acid sequences encoding human sprouty-related, EVH1 domain containing 2 (SPRED2) and (C) the amino acid sequence of human SPRED2.

[0164] FIG. 122A-G shows the (A-B) nucleic acid sequences encoding human chromosome 16 open reading frame 65 (C16orf65) and (C) the amino acid sequence of human chromosome 16 open reading frame 65 (C16orf65).

[0165] FIG. 123A-B shows the (A) nucleic acid sequence encoding human chromosome 12 open reading frame 2 (C12orf2) and (B) the amino acid sequence of human chromosome 12 open reading frame 2 (C12orf2).

[0166] FIG. 124A-B shows the (A) nucleic acid sequence encoding human multiple PDZ domain protein (MPDZ) and (B) the amino acid sequence of human MPDZ.

[0167] FIG. 125A-B shows the (A) nucleic acid sequence encoding human phenylalanine-tRNA synthetase 2 (FARS2) and (B) the amino acid sequence of human FARS2.

[0168] FIG. 126A-B shows the (A) nucleic acid sequence encoding human caspase 8, apoptosis-related cysteine protease (CASP8) and (B) the amino acid sequence of human CASP8.

[0169] FIG. 127A-B shows the (A) nucleic acid sequence encoding human 5′-nucleotidase, ecto (CD73) (NT5E) and (B) the amino acid sequence of human NT5E.

[0170] FIG. 128 shows the nucleic acid sequence corresponding to human teratocarcinoma-derived growth factor 3 (TDGF3).

[0171] FIG. 129A-B shows the (A) nucleic acid sequence encoding human butyrophilin-like 3 (BTNL3) and (B) the amino acid sequence of human BTNL3.

[0172] FIG. 130A-B shows the (A) nucleic acid sequence encoding human S100A8 and (B) the amino acid sequence of human S100A8.

[0173] FIG. 131A-B shows the (A) nucleic acid sequence encoding human CCL20 and (B) the amino acid sequence of human CCL20.

### DETAILED DESCRIPTION OF THE INVENTION

### A. Definitions

[0174] Unless defined otherwise, technical and scientific terms used herein have the same meaning as commonly understood by one of ordinary skill in the art to which this invention belongs. Singleton et al., Dictionary of Microbiology and Molecular Biology 2nd ed., J. Wiley & Sons (New York, N.Y. 1994), and March, Advanced Organic Chemistry Reactions. Mechanisms and Structure 4th ed., John Wiley & Sons (New York, N.Y. 1992), provide one skilled in the art with a general guide to many of the terms used in the present application.

[0175] One skilled in the art will recognize many methods and materials similar or equivalent to those described herein, which could be used in the practice of the present invention. Indeed, the present invention is in no way limited to the methods and materials described. For purposes of the present invention, the following terms are defined below.

[0176] The term “inflammatory bowel disease” or “IBD” is used as a collective term for ulcerative colitis and Crohn's disease. Although the two diseases are generally considered as two different entities, their common characteristics, such as patchy necrosis of the surface epithelium, focal accumulations of leukocytes adjacent to glandular crypts, and an increased number of intraepithelial lymphocytes (IEL) and certain macrophage subsets, justify their treatment as a single disease group.

[0177] The term “Crohn's disease” or “CD” is used herein to refer to a condition involving chronic inflammation of the gastrointestinal tract. Crohn's-related inflammation usually affects the intestines, but may occur anywhere from the mouth to the anus. CD differs from UC in that the inflammation extends through all layers of the intestinal wall and involves mesentery as well as lymph nodes. The disease is often discontinuous, i.e., severely diseased segments of bowel are separated from apparently disease-free areas. In CD, the bowel wall also thickens which can lead to obstructions, and the development of fistulas and fissures are not uncommon. As used herein, CD may be one or more of several types of CD, including without limitation, ileocolitis (affects the ileum and the large intestine); ileitis (affects the ileum); gastroduodenal CD (inflammation in the stomach and the duodenum); jejunoileitis (spotty patches of inflammation in the jejunum); and Crohn's (granulomatous) colitis (only affects the large intestine).

[0178] The term “ulcerative colitis” or “UC” is used herein to refer to a condition involving inflammation of the large intestine and rectum. In patients with UC, there is an inflammatory reaction primarily involving the colonic mucosa. The inflammation is typically uniform and continuous with no intervening areas of normal mucosa. Surface mucosal cells as well as crypt epithelium and submucosa are involved in an inflammatory reaction with neutrophil infiltration. Ultimately, this reaction typically progresses to epithelial damage and loss of epithelial cells resulting in multiple ulcerations, fibrosis, dysplasia and longitudinal retraction of the colon.

[0179] The term “inactive” IBD is used herein to mean an IBD that was previously diagnosed in an individual but is currently in remission. This is in contrast to an “active” IBD in which an individual has been diagnosed with and IBD but has not undergone treatment. In addition, the active IBD may be a recurrence of a previously diagnosed and treated IBD that had gone into remission (i.e. become an inactive IBD). Such recurrences may also be referred to herein as “flare-ups” of an IBD. Mammalian subjects having an active autoimmune disease, such as an IBD, may be subject to a flare-up, which is a period of heightened disease activity or a return of corresponding symptoms, flare-ups may occur in response to severe infection, allegic reactions, physical stress, emotional trauma, surgery, or environmental factors.

[0180] The term “modulate” is used herein to mean that the expression of the gene, or level of RNA molecule or equivalent RNA molecules encoding one or more proteins or protein subunits, or activity of one or more proteins or protein subunits is up regulated or down regulated, such that expression, level, or activity is greater than or less than that observed in the absence of the modulator.

[0181] The terms “inhibit”, “down-regulate”, “underexpress” and “reduce” are used interchangeably and mean that the expression of a gene, or level of RNA molecules or equivalent RNA molecules encoding one or more proteins or protein subunits, or activity of one or more proteins or protein subunits, is reduced relative to one or more controls, such as, for example, one or more positive and/or negative controls.

[0182] The term “up-regulate” or “overexpress” is used to mean that the expression of a gene, or level of RNA molecules or equivalent RNA molecules encoding one or more proteins or protein subunits, or activity of one or more proteins or protein subunits, is elevated relative to one or more controls, such as, for example, one or more positive and/or negative controls.

[0183] The term “diagnosis” is used herein to refer to the identification of a molecular or pathological state, disease or condition, such as the identification of IBD.

[0184] The term “prognosis” is used herein to refer to the prediction of the likelihood of IBD development or progression, including autoimmune flare-ups and recurrences following surgery. Prognostic factors are those variables related to the natural history of IBD, which influence the recurrence rates and outcome of patients once they have developed IBD. Clinical parameters that may be associated with a worse prognosis include, for example, an abdominal mass or tenderness, skin rash, swollen joints, mouth ulcers, and borborygmus (gurgling or splashing sound over the intestine). Prognostic factors may be used to categorize patients into subgroups with different baseline recurrence risks.

[0185] The “pathology” of an IBD includes all phenomena that compromise the well-being of the patient. IBD pathology is primarily attributed to abnormal activation of the immune system in the intestines that can lead to chronic or acute inflammation in the absence of any known foreign antigen, and subsequent ulceration. Clinically, IBD is characterized by diverse manifestations often resulting in a chronic, unpredictable course. Bloody diarrhea and abdominal pain are often accompanied by fever and weight loss. Anemia is not uncommon, as is severe fatigue. Joint manifestations ranging from arthralgia to acute arthritis as well as abnormalities in liver function are commonly associated with IBD. During acute “attacks” of IBD, work and other normal activity are usually impossible, and often a patient is hospitalized.

[0186] The aetiology of these diseases is unknown and the initial lesion has not been clearly defined; however, patchy necrosis of the surface epithelium, focal accumulations of leukocytes adjacent to glandular crypts, and an increased number of intraepithelial lymphocytes and certain macrophage subsets have been described as putative early changes, especially in Crohn's disease.

[0187] The term “treatment” refers to both therapeutic treatment and prophylactic or preventative measures for IBD, wherein the object is to prevent or slow down (lessen) the targeted pathologic condition or disorder. Those in need of treatment include those already with an IBD as well as those prone to have an IBD or those in whom the IBD is to be prevented. Once the diagnosis of an IBD has been made by the methods disclosed herein, the goals of therapy are to induce and maintain a remission.

[0188] Various agents that are suitable for use as an “IBD therapeutic agent” are known to those of ordinary skill in the art. As described herein, such agents include without limitation, aminosalicylates, corticosteroids, and immunosuppressive agents.

[0189] The term “test sample” refers to a sample from a mammalian subject suspected of having an IBD, known to have an IBD, or known to be in remission from an IBD. The test sample may originate from various sources in the mammalian subject including, without limitation, blood, semen, serum, urine, bone marrow, mucosa, tissue, etc.

[0190] The term “control” or “control sample” refers a negative control in which a negative result is expected to help correlate a positive result in the test sample. Controls that are suitable for the present invention include, without limitation, a sample known to have normal levels of gene expression, a sample obtained from a mammalian subject known not to have an IBD, and a sample obtained from a mammalian subject known to be normal. A control may also be a sample obtained from a subject previously diagnosed and treated for an IBD who is currently in remission; and such a control is useful in determining any recurrence of an IBD in a subject who is in remission. In addition, the control may be a sample containing normal cells that have the same origin as cells contained in the test sample. Those of skill in the art will appreciate other controls suitable for use in the present invention.

[0191] The term “microarray” refers to an ordered arrangement of hybridizable array elements, preferably polynucleotide probes, on a substrate.

[0192] The term “polynucleotide,” when used in singular or plural, generally refers to any polyribonucleotide or polydeoxribonucleotide, which may be unmodified RNA or DNA or modified RNA or DNA. Thus, for instance, polynucleotides as defined herein include, without limitation, single- and double-stranded DNA, DNA including single- and double-stranded regions, single- and double-stranded RNA, and RNA including single- and double-stranded regions, hybrid molecules comprising DNA and RNA that may be single-stranded or, more typically, double-stranded or include single- and double-stranded regions. In addition, the term “polynucleotide” as used herein refers to triple-stranded regions comprising RNA or DNA or both RNA and DNA. The strands in such regions may be from the same molecule or from different molecules. The regions may include all of one or more of the molecules, but more typically involve only a region of some of the molecules. One of the molecules of a triple-helical region often is an oligonucleotide. The term “polynucleotide” specifically includes cDNAs. The term includes DNAs (including cDNAs) and RNAs that contain one or more modified bases. Thus, DNAs or RNAs with backbones modified for stability or for other reasons are “polynucleotides” as that term is intended herein. Moreover, DNAs or RNAs comprising unusual bases, such as inosine, or modified bases, such as tritiated bases, are included within the term “polynucleotides” as defined herein. In general, the term “polynucleotide” embraces all chemically, enzymatically and/or metabolically modified forms of unmodified polynucleotides, as well as the chemical forms of DNA and RNA characteristic of viruses and cells, including simple and complex cells.

[0193] The term “oligonucleotide” refers to a relatively short polynucleotide, including, without limitation, single-stranded deoxyribonucleotides, single- or double-stranded ribonucleotides, RNA:DNA hybrids and double-stranded DNAs. Oligonucleotides, such as single-stranded DNA probe oligonucleotides, are often synthesized by chemical methods, for example using automated oligonucleotide synthesizers that are commercially available. However, oligonucleotides can be made by a variety of other methods, including in vitro recombinant DNA-mediated techniques and by expression of DNAs in cells and organisms.

[0194] The terms “differentially expressed gene,” “differential gene expression” and their synonyms, which are used interchangeably, refer to a gene whose expression is activated to a higher or lower level in a subject suffering from a disease, specifically an IBD, such as UC or CD, relative to its expression in a normal or control subject. The terms also include genes whose expression is activated to a higher or lower level at different stages of the same disease. It is also understood that a differentially expressed gene may be either activated or inhibited at the nucleic acid level or protein level, or may be subject to alternative splicing to result in a different polypeptide product. Such differences may be evidenced by a change in mRNA levels, surface expression, secretion or other partitioning of a polypeptide, for example. Differential gene expression may include a comparison of expression between two or more genes or their gene products, or a comparison of the ratios of the expression between two or more genes or their gene products, or even a comparison of two differently processed products of the same gene, which differ between normal subjects and subjects suffering from a disease, specifically an IBD, or between various stages of the same disease. Differential expression includes both quantitative, as well as qualitative, differences in the temporal or cellular expression pattern in a gene or its expression products among, for example, normal and diseased cells, or among cells which have undergone different disease events or disease stages, for the purpose of this invention, “differential gene expression” is considered to be present when there is at least an about two-fold, preferably at least about four-fold, more preferably at least about six-fold, most preferably at least about ten-fold difference between the expression of a given gene in normal and diseased subjects, or in various stages of disease development in a diseased subject.

[0195] The term “over-expression” with regard to an RNA transcript is used to refer to the level of the transcript determined by normalization to the level of reference mRNAs, which might be all transcripts detected in the specimen or a particular reference set of mRNAs.

[0196] The phrase “gene amplification” refers to a process by which multiple copies of a gene or gene fragment are formed in a particular cell or cell line. The duplicated region (a stretch of amplified DNA) is often referred to as “amplicon”. Usually, the amount of the messenger RNA (mRNA) produced, i.e., the level of gene expression, also increases in the proportion of the number of copies made of the particular gene expressed.

[0197] In general, the term “marker” or “biomarker” or refers to an identifiable physical location on a chromosome, such as a restriction endonuclease recognition site or a gene, whose inheritance can be monitored. The marker may be an expressed region of a gene referred to as a “gene expression marker”, or some segment of DNA with no known coding function. An “IBD marker” as used herein refers those genes listed in Tables 1, 2, and 3.

[0198] “Stringency” of hybridization reactions is readily determinable by one of ordinary skill in the art, and generally is an empirical calculation dependent upon probe length, washing temperature, and salt concentration. In general, longer probes require higher temperatures for proper annealing, while shorter probes need lower temperatures. Hybridization generally depends on the ability of denatured DNA to reanneal when complementary strands are present in an environment below their melting temperature. The higher the degree of desired homology between the probe and hybridizable sequence, the higher the relative temperature which can be used. As a result, it follows that higher relative temperatures would tend to make file reaction conditions more stringent, while lower temperatures less so. For additional details and explanation of stringency of hybridization reactions, see Ausubel et al., Current Protocols in Molecular Biology, Wiley Interscience Publishers, (1995).

[0199] “Stringent conditions” or “high stringency conditions”, as defined herein, typically: (1) employ low ionic strength and high temperature for washing, for example 0.015 M sodium chloride/0.0015 M sodium citrate/0.1% sodium dodecyl sulfate at 50° C.; (2) employ during hybridization a denaturing agent, such as formamide, for example, 50% (v/v) formamide with 0.1% bovine serum albumin/0.1% Ficoll/0.1% polyvinylpyrrolidone/50 mM sodium phosphate buffer at pH 6.5 with 750 mM sodium chloride, 75 mM sodium citrate at 42° C.; or (3) employ 50% formamide, 5×SSC (0.75 M NaCl, 0.075 M sodium citrate), 50 mM sodium phosphate (pH 6.8), 0.1% sodium pyrophosphate, 5× Denhardt's solution, sonicated salmon sperm DNA (50 μg/ml), 0.1% SDS, and 10% dextran sulfate at 42° C., with washes at 42° C. in 0.2×SSC (sodium chloride/sodium citrate), 50% ibrmamide, followed by a high-stringency wash consisting of 0.1×SSC containing EDTA at 55° C.

[0200] “Moderately stringent conditions” may be identified as described by Sambrook et al., Molecular Cloning; A Laboratory Manual, New York: Cold Spring Harbor Press, 1989, and include the use of washing solution and hybridization conditions (e.g., temperature, ionic strength and % SDS) less stringent that those described above. An example of moderately stringent conditions is overnight incubation at 37° C. in a solution comprising: 20% formamide, 5×SSC (150 mM NaCl, 15 mM trisodium citrate), 50 mM sodium phosphate (pH 7.6), 5×Denhardt's solution, 10% dextran sulfate, and 20 mg/ml denatured sheared salmon sperm DNA, followed by washing the filters in 1×SSC at about 37-50° C. The skilled artisan will recognize how to adjust the temperature, ionic strength, etc. as necessary to accommodate factors such as probe length and the like.

[0201] In the context of the present invention, reference to “at least one,” “at least two,” “at least five,” etc. of the genes listed in any particular gene set means any one or any and all combinations of the genes listed.

[0202] The terms “splicing” and “RNA splicing” are used interchangeably and refer to RNA processing that removes introns and joins exons to produce mature mRNA with continuous coding sequence that moves into the cytoplasm of an cukaryotic cell.

[0203] In theory, the term “exon” refers to any segment of an interrupted gene that is represented in the mature RNA product (B. Lewin. Genes IV Cell Press, Cambridge Mass. 1990). In theory the term “intron” refers to any segment of DNA that is transcribed but removed from within the transcript by splicing together the exons on either side of it. Operationally, exon sequences occur in the mRNA sequence of a gene as defined by Ref. SEQ ID numbers. Operationally, intron sequences are the intervening sequences within the genomic DNA of a gene, bracketed by exon sequences and having GT and AG splice consensus sequences at their 5′ and 3′ boundaries.

[0204] An “interfering RNA” or “small interfering RNA (siRNA)” is a double stranded RNA molecule usually less than about 30 nucleotides in length that reduces expression of a target gene. Interfering RNAs may be identified and synthesized using known methods (Shi Y., Trends in Genetics 19(1):9-12 (2003), WO/2003056012 and WO2003064621), and siRNA libraries are commercially available, for example from Dharmacon, Lafayette, Colo.

[0205] A “native sequence” polypeptide is one which has the same amino acid sequence as a polypeptide derived from nature, including naturally occurring or allelic variants. Such native sequence polypeptides can be isolated from nature or can be produced by recombinant or synthetic means. Thus, a native sequence polypeptide can have the amino acid sequence of naturally occurring human polypeptide, murine polypeptide, or polypeptide from any other mammalian species.

[0206] The term “antibody” herein is used in the broadest sense and specifically covers monoclonal antibodies, polyclonal antibodies, multispecific antibodies (e.g. bispecific antibodies), and antibody fragments, so long as they exhibit the desired biological activity. The present invention particularly contemplates antibodies against one or more of the IBD markers disclosed herein. Such antibodies may be referred to as “anti-IBD marker antibodies”.

[0207] The term “monoclonal antibody” as used herein refers to an antibody from a population of substantially homogeneous antibodies, i.e., the individual antibodies comprising the population are identical and/or bind the same epitope(s), except for possible variants that may arise during production of the monoclonal antibody, such variants generally being present in minor amounts. Such monoclonal antibody typically includes an antibody comprising a polypeptide sequence that binds a target, wherein the target-binding polypeptide sequence was obtained by a process that includes the selection of a single target binding polypeptide sequence from a plurality of polypeptide sequences.

[0208] The monoclonal antibodies herein specifically include “chimeric” antibodies in which a portion of the heavy and/or light chain is identical with or homologous to corresponding sequences in antibodies derived from a particular species or belonging to a particular antibody class or subclass, while the remainder of the chain(s) is identical with or homologous to corresponding sequences in antibodies derived from another species or belonging to another antibody class or subclass, as well as fragments of such antibodies, so long as they exhibit the desired biological activity (U.S. Pat. No. 4,816,567; and Morrison et al., Proc. Natl. Acad. Sci. USA, 81:6851-6855 (1984)). Chimeric antibodies of interest herein include “primatized” antibodies comprising variable domain antigen-binding sequences derived from a non-human primate (e.g. Old World Monkey, Ape etc) and human constant region sequences, as well as “humanized” antibodies.

[0209] “Humanized” forms of non-human (e.g., rodent) antibodies are chimeric antibodies that contain minimal sequence derived from non-human immunoglobulin. For the most part, humanized antibodies are human immunoglobulins (recipient antibody) in which residues from a hypervariable region of the recipient are replaced by residues from a hypervariable region of a non-human species (donor antibody) such as mouse, rat, rabbit or nonhuman primate having the desired specificity, affinity, and capacity.

[0210] An “intact antibody” herein is one which comprises two antigen binding regions, and an Fc region. Preferably, the intact antibody has a functional Fc region.

[0211] “Antibody fragments” comprise a portion of an intact antibody, preferably comprising the antigen binding region thereof. Examples of antibody fragments include Fab, Fab′, F(ab′)₂, and Fv fragments; diabodies; linear antibodies; single-chain antibody molecules; and multispecific antibodies formed from antibody fragment(s).

[0212] “Native antibodies” are usually heterotetrameric glycoproteins of about 150,000 daltons, composed of two identical light (L) chains and two identical heavy (H) chains. Each light chain is linked to a heavy chain by one covalent disulfide bond, while the number of disulfide linkages varies among the heavy chains of different immunoglobulin isotypes. Bach heavy and light chain also has regularly spaced intrachain disulfide bridges. Each heavy chain has at one end a variable domain (V_{H}) followed by a number of constant domains. Each light chain has a variable domain at one end (V_{L}) and a constant domain at its other end. The constant domain of the light chain is aligned with the first constant domain of the heavy chain, and the light-chain variable domain is aligned with the variable domain of the heavy chain. Particular amino acid residues are believed to form an interface between the light chain and heavy chain variable domains.

[0213] The term “variable” refers to the fact that certain portions of the variable domains differ extensively in sequence among antibodies and are used in the binding and specificity of each particular antibody for its particular antigen. However, the variability is not evenly distributed throughout the variable domains of antibodies. It is concentrated in three segments called hypervariable regions both in the light chain and the heavy chain variable domains. The more highly conserved portions of variable domains are called the framework regions (FRs). The variable domains of native heavy and light chains each comprise four FRs, largely adopting a β-sheet configuration, connected by three hypervariable regions, which form loops connecting, and in some cases forming part of, the β-sheet structure. The hypervariable regions in each chain are held together in close proximity by the FRs and, with the hypervariable regions from the other chain, contribute to the formation of the antigen-binding site of antibodies (see Kabat et al., Sequences of Proteins of Immunological Interest, 5th Ed. Public Health Service, National Institutes of Health, Bethesda, Md. (1991)).

[0214] The term “hypervariable region,” “HVR,” or “HV,” when used herein refers to the regions of an antibody-variable domain that are hypervariable in sequence and/or form structurally defined loops. Generally, antibodies comprise six HVRs; three in the VH (H1, H2, H3), and three in the VL (L1, L2, L3). In native antibodies, H3 and L3 display the most diversity of the six HVRs, and H3 in particular is believed to play a unique role in conferring line specificity to antibodies. See, e.g., Xu et al. Immunity 13:37-45 (2000); Johnson and Wu in Methods in Molecular Biology 248:1-25 (Lo, ed., Human Press, Totowa, N.J., 2003)). Indeed, naturally occurring camelid antibodies consisting of a heavy chain only are functional and stable in the absence of light chain. See, e.g., Hamers-Casterman et al., Nature 363:446-448 (1993) and Sheriff et al., Nature Struct. Biol. 3:733-736 (1996).

[0215] A number of hypervariable region delineations are in use and are encompassed herein. The Kabat Complementarity Determining Regions (CDRs) are based on sequence variability and are the most commonly used (Kabat et al., Sequences of Proteins of Immunological Interest, 5th Ed. Public Health Service, National Institutes of Health, Bethesda, Md. (1991)). Chothia refers instead to the location of the structural loops (Chothia and Lesk J. Mol. Biol. 196:901-917 (1987)). The end of the Chothia CDR-H1 loop when numbered using the Kabat numbering convention varies between H32 and H34 (see below) depending on the length of the loop (this is because the Kabat numbering scheme places the insertions at H35A and H35B; if neither 35A nor 35B is present, the loop ends at 32; if only 35A is present, the loop ends at 33: if both 35A and 35B are present, the loop ends at 34). The AbM hypervariable regions represent a compromise between the Kabat CDRs and Chothia structural loops, and are used by Oxford Molecular's AbM antibody modeling software. The “contact” hypervariable regions are based on an analysis of the available complex crystal structures. The residues from each of these hypervariable regions are noted below.

| Loop | Kabat | AbM | Chothia | Contact |
|---|---|---|---|---|
| L1 | L24-L34 | L24-L34 | L24-L34 | L30-L36 |
| L2 | L50-L56 | L50-L56 | L50-L56 | L46-L55 |
| L3 | L89-L97 | L89-L97 | L89-L97 | L89-L96 |
| H1 | H31-H35B | H26-H35B | H26-H32, | H30-H35B |
| | | | 33 or 34 | (Kabat Numbering) |
| H1 | H31-H35 | H26-H35 | H26-H32 | H30-H35 |
| | | | | (Chothia Numbering) |
| H2 | H50-H65 | H50-H58 | H52-H56 | H47-H58 |
| H3 | H95-H102 | H95-H102 | H95-H102 | H93-H101. |

[0216] Hypervariable regions may comprise “extended hypervariable regions” as follows: 24-36 or 24-34 (L1), 46-56 or 50-56 (L2) and 89-97 (L3) in the VL and 26-35B (H1), 50-65, 47-65 or 49-65 (112) and 93-102, 94-102 or 95-102 (H3) in the VH. These extended hypervariable regions are typically combinations of the Kabat and Chothia definitions, which may optionally further include residues identified using the Contact definition. The variable domain residues are numbered according to Kabat et al., supra for each of these definitions.

[0217] Papain digestion of antibodies produces two identical antigen-binding fragments, called “Fab” fragments, each with a single antigen-binding site, and a residual “Fc” fragment, whose name reflects its ability to crystallize readily. Pepsin treatment yields an F(ab′)₂ fragment that has two antigen-binding sites and is still capable of cross-linking antigen.

[0218] “Fv” is the minimum antibody fragment which contains a complete antigen-recognition and antigen-binding site. This region consists of a dinner of one heavy chain and one light chain variable domain in tight, non-covalent association. It is in this configuration that the three hypervariable regions of each variable domain interact to define an antigen-binding site on the surface of the V_{H}-V_{L} dimer. Collectively, the six hypervariable regions confer antigen-binding specificity to the antibody. However, even a single variable domain (or half of an Fv comprising only three hypervariable regions specific for an antigen) has the ability to recognize and bind antigen, although at a lower affinity than the entire binding site.

[0219] The Fab fragment also contains the constant domain of the light chain and the first constant domain (CH1) of the heavy chain. Fab′ fragments differ from Fab fragments by the addition of a few residues at the carboxy terminus of the heavy chain CH1 domain including one or more cysteines from the antibody hinge region. Fab′-SH is the designation herein for Fab′ in which the cysteine residue(s) of the constant domains bear at least one free thiol group. F(ab′)₂ antibody fragments originally were produced as pairs of Fab′ fragments which have hinge cysteines between them. Other chemical couplings of antibody fragments are also known.

[0220] The “light chains” of antibodies from any vertebrate species can be assigned to one of two clearly distinct types, called kappa (κ) and lambda (λ), based on the amino acid sequences of their constant domains.

[0221] The term “Fc region” herein is used to define a C-terminal region of an immunoglobulin heavy chain, including native sequence Fc regions and variant Fc regions. Although the boundaries of the Fc region of an immunoglobulin heavy chain might vary, the human IgG heavy chain Fc region is usually defined to stretch from an ammo acid residue at position Cys226, or from Pro230, to the carboxyl-terminus thereof “The C-terminal lysine (residue 447 according to the EU numbering system) of the Fc region may be removed, for example, during production or purification of the antibody, or by recombinantly engineering the nucleic acid encoding a heavy chain of the antibody. Accordingly, a composition of intact antibodies may comprise antibody populations with all K447 residues removed, antibody populations with no K447 residues removed, and antibody populations having a mixture of antibodies with and without the K447 residue.

[0222] Unless indicated otherwise, herein the numbering of the residues in an immunoglobulin heavy chain is that of the EU index as in Kabat et al., Sequences of Proteins of Immunological Interest, 5th Ed. Public Health Service, National Institutes of Health, Bethesda, Md. (1991), expressly incorporated herein by reference. The “EU index as in Kabat” refers to the residue numbering of the human IgG1 EU antibody.

[0223] A “native sequence Fc region” comprises an amino acid sequence identical to the amino acid sequence of an Fc region found in nature. Native sequence human Fc regions include a native sequence human IgG1 Fc region (non-A and A allotypes); native sequence human IgG2 Fc region; native sequence human IgG3 Fc region; and native sequence human IgG4 Fc region as well as naturally occurring variants thereof.

[0224] A “variant Fc region” comprises an amino acid sequence which differs from that of a native sequence Fc region by virtue of at least one amino acid modification, preferably one or more amino acid substitution(s). Preferably, the variant Fc region has at least one amino acid substitution compared to a native sequence Fc region or to the Fc region of a parent polypeptide, e.g. from about one to about ten amino acid substitutions, and preferably from about one to about five amino acid substitutions in a native sequence Fc region or in the Fc region of the parent polypeptide. The variant Fc region herein will preferably possess at least about 80% homology with a native sequence Fc region and/or with an Fc region of a parent polypeptide, and most preferably at least about 90% homology therewith, more preferably at least about 95% homology therewith.

[0225] Depending on the amino acid sequence of the constant domain of their heavy chains, intact antibodies can be assigned to different “classes”. There are five major classes of intact antibodies: IgA, IgD, IgE, IgG, and IgM, and several of these may be further divided into “subclasses” (isotypes), e.g., IgG1, IgG2, IgG3, IgG4, IgA, and IgA2. The heavy-chain constant domains that correspond to the different classes of antibodies are called α, δ, ε, γ, and μ, respectively. The subunit structures and three-dimensional configurations of different classes of immunoglobulins are well known.

[0226] “Single-chain Fv” or “scFv” antibody fragments comprise the V_{H} and V_{L} domains of antibody, wherein these domains are present in a single polypeptide chain. Preferably, the Fv polypeptide further comprises a polypeptide linker between the V_{H} and V_{L} domains which enables the scFv to form the desired structure for antigen binding. For a review of scFv sec Plückthun in The Pharmacology of Monoclonal Antibodies, vol. 113, Rosenburg and Moore eds., Springer-Verlag, New York, pp. 269-315 (1994).

[0227] The term “diabodies” refers to small antibody fragments with two antigen-binding sites, which fragments comprise a variable heavy domain (V_{H}) connected to a variable light domain (V_{L}) in the same polypeptide chain (V_{H}-V_{L}). By using a linker that is too short to allow pairing between the two domains on the same chain, the domains are forced to pair with the complementary domains of another chain and create two antigen-binding sites. Diabodies are described more fully in, for example, EP 404,097; WO 93/11161; and Hollinger et al., Proc. Natl. Acad. Sci. USA, 90:6444-6448 (1993).

[0228] A “naked antibody” is an antibody that is not conjugated to a heterologous molecule, such as a small molecule or radiolabel.

[0229] An “isolated” antibody is one which has been identified and separated and/or recovered from a component of its natural environment. Contaminant components of its natural environment are materials which would interfere with diagnostic or therapeutic uses for the antibody, and may include enzymes, hormones, and other proteinaceous or nonproteinaceous solutes. In preferred embodiments, the antibody will be purified (1) to greater than 95% by weight of antibody as determined by the Lowry method, and most preferably more than 99% by weight, (2) to a degree sufficient to obtain at least 15 residues of N-terminal or internal amino acid sequence by use of a spinning cup sequenator, or (3) to homogeneity by SDS-PAGE under reducing or nonreducing conditions using Coomassie blue or, preferably, silver stain. Isolated antibody includes the antibody in situ within recombinant cells since at least one component of the antibody's natural environment will not be present. Ordinarily, however, isolated antibody will be prepared by at least one purification step.

[0230] An “affinity matured” antibody is one with one or more alterations in one or more hypervariable regions thereof which result an improvement in the affinity of the antibody for antigen, compared to a parent antibody which docs not possess those alteration(s). Preferred affinity matured antibodies will have nanomolar or even picomolar affinities for the target antigen. Affinity matured antibodies are produced by procedures known in the art. Marks et al. Bio/Technology 10:779-783 (1992) describes affinity maturation by VH and VL domain shuffling. Random mutagenesis of HVR and/or framework residues is described by: Barbas et al. Proc Nat. Acad. Sci, USA 91:3809-3813 (1994); Schiere et al. Gene 169:147-155 (1995); Yelton et al. J. Immunol 155:1994-2004 (1995); Jackson et al., J. Immunol. 154(7):3310-9 (1995); and Hawkins et al., J. Mol. Biol. 226:889-896 (1992).

[0231] An “amino acid sequence variant” antibody herein is an antibody with an amino acid sequence which differs from a main species antibody. Ordinarily, amino acid sequence variants will possess at least about 70% homology with the main species antibody, and preferably, they will be at least about 80%, more preferably at least about 90% homologous with the main species antibody. The amino acid sequence variants possess substitutions, deletions, and/or additions at certain positions within or adjacent to the amino acid sequence of the main species antibody. Examples of amino acid sequence variants herein include an acidic variant (e.g. deamidated antibody variant), a basic variant, an antibody with an amino-terminal leader extension (e.g. VHS-) on one or two light chains thereof, an antibody with a C-terminal lysine residue on one or two heavy chains thereof, etc., and includes combinations of variations to the amino acid sequences of heavy and/or light chains. The antibody variant of particular interest herein is the antibody comprising an amino-terminal leader extension on one or two light chains thereof, optionally further comprising other amino acid sequence and/or glycosylation differences relative to the main species antibody.

[0232] A “glycosylation variant” antibody herein is an antibody with one or more carbohydrate moieties attached thereto which differ from one or more carbohydrate moieties attached to a main species antibody. Examples of glycosylation variants herein include antibody with a G1 or G2 oligosaccharide structure, instead a G0 oligosaccharide structure, attached to an he region thereof, antibody with one or two carbohydrate moieties attached to one or two light chains thereof, antibody with no carbohydrate attached to one or two heavy chains of the antibody, etc., and combinations of glycosylation alterations.

[0233] Where the antibody has an Fc region, an oligosaccharide structure may be attached to one or two heavy chains of the antibody, e.g. at residue 299 (298, Eu numbering of residues). For pertuzumab, G0 was the predominant oligosaccharide structure, with other oligosaccharide structures such as G0-F, G-1, Man5, Man6, G1-1, G1(1-6), G1(1-3) and G2 being found in lesser amounts in the pertuzumab composition.

[0234] Unless indicated otherwise, a “G1 oligosaccharide structure” herein includes G-1, G1-1, G1 (1-6) and G1(1-3) structures.

[0235] An “amino-terminal leader extension” herein refers to one or more amino acid residues of the amino-terminal leader sequence that are present at the amino-terminus of any one or more heavy or light chains of an antibody. An exemplary amino-terminal leader extension comprises or consists of three amino acid residues, VHS, present on one or both light chains of an antibody variant.

[0236] A “deamidated” antibody is one in which one or more asparagine residues thereof has been derivatized, e.g. to an aspartic acid, a succinimide, or an iso-aspartic acid.

### B.1 General Description of the Invention

[0237] The practice of the present invention will employ, unless otherwise indicated, conventional techniques of molecular biology (including recombinant techniques), microbiology, cell biology, and biochemistry, which are within the skill of the art. Such techniques are explained fully in the literature, such as, “Molecular Cloning: A Laboratory Manual”, 2^{nd} edition (Sambrook et al., 1989); “Oligonucleotide Synthesis” (M. J. Gait, ed., 1984); “Animal Cell Culture” (R. I. Freshney, ed., 1987); “Methods in Enzymology” (Academic Press, Inc.); “Handbook of Experimental Immunology”, 4^{th} edition (D. M. Weir & C. C. Blackwell, eds., Blackwell Science Inc., 1987); “Gene Transfer Vectors for Mammalian Cells” (J. M. Miller & M. P. Calos, eds., 1987); “Current Protocols in Molecular Biology” (F. M. Ausubel et al., eds., 1987); and “PCR: The Polymerase Chain Reaction”, (Mullis et al., eds., 1994).

[0238] As discussed above, the detection or diagnosis of IBD is currently obtained by various classification systems that rely on a number of variables observed in a patient. The present invention is based on the identification of genes that are associated with IBD. Accordingly, the expression levels of such genes can serve as diagnostic markers to identify patients with IBD. As described in the Examples, the differential expression of a number of genes in IBD patients has been observed. Thus, according to the present invention, the genes listed in Tables 1A-B, 2, and 3A-B have been identified as differentially expressed in IBD.

[0239] Table 1A provides a list of genes that are upregulated in IBD.

TABLE 1A

| | | SEQ ID NO | |
|---|---|---|---|
| | | nucleic acid, | |
| Gene | Indication(s) | amino acid | FIG. |
| Defensin, alpha 6 (DEFA6) | CD, UC | 1, 2 | 8 |
| Defensin, alpha 5 (DEFA5) | UC | 3, 4 | 9A-B |
| Defensin beta 14 (DEFB14) | UC | 229, 230 | 9C-D |
| IL-3 receptor, alpha low affinity (IL3RA) | CD | 5, 6 | 10 |
| IL-2 receptor, alpha (IL2RA) | CD, UC | 7, 8 | 11 |
| Regenerating islet-derived 3 gamma (REG3G) | CD, UC | 9, 10 | 12 |
| Regenerating islet-derived 1 beta pancreatic stone | CD, UC | 11, 12 | 13 |
| protein (REG1B) | | | |
| Potassium voltage-gated channel, Shal-related | CD, UC | 13, 14 | 14 |
| subfamily (KCND3) | | | |
| Human macrophage inflammatory protein 3 (MIP-3a) | CD, UC | 15, 16 | 15 |
| Endothelial cell growth factor 1 platelet-derived | CD, UC | 17, 18 | 16 |
| (ECGF1) | | | |
| Interleukin 1 beta (IL1B) | CD, UC | 19, 20 | 17 |
| Growth regulated protein gamma (MIP2BGRO-g) | CD, UC | 21, 22 | 18 |
| Chemokine C—X—C motif ligand 1 (CXCL1) | CD, UC | 23, 24 | 19 |
| Inhibitor of apoptosis protein 1 (IAP1) | CD, UC | 25, 26 | 20 |
| Caspase 5, apoptosis-related cysteine protease | CD, UC | 27, 28 | 21 |
| (CASP5) | | | |
| Deleted in malignant brain tumors 1 (DMBT1) | CD, UC | 29, 30 | 22 |
| Protocadherin 17 (PCDH17) | CD, UC | 31, 32 | 23 |
| Interferon-inducible protein 9-27 (IFITM1) | CD, UC | 33, 34 | 24 |
| PDZK1 interacting protein 1 (PDZK1IP1) | CD, UC | 35, 36 | 25 |
| IRTA2/FCRH5 (IRTA2) | CD | 37, 38 | 26 |
| Solute carrier family 40 iron-regulated transporter, | CD, UC | 39, 40 | 27 |
| member 1 (SLC40A1) | | | |
| Immunoglobulin heavy variable 4-4 (IGHV4-4) | CD, UC | 41, 42 | 28 |
| Regenerating islet-derived 3 gamma (REG3G) | CD, UC | 43, 44 | 29 |
| Aquaporin 9 (AQP9) | CD, UC | 45, 46 | 30 |
| Olfactomedin 4 (OLFM4) | CD, UC | 47, 48 | 31 |
| S100 calcium binding protein A9 calgranulin B | CD, UC | 49, 50 | 32 |
| (S100A9) | | | |
| unc-5 homolog C C. elegans-like (UNC5CL) | CD, UC | 51, 52 | 33 |
| G protein-coupled receptor 110 (GPR110) | CD, UC | 53, 54 | 34 |
| HLA-G histocompatibility antigen, class I, G (HLA- | CD, UC | 55, 56 | 35 |
| G) | | | |
| Transporter 1, ATP-binding cassette, sub-family B | CD, UC | 57, 58 | 36 |
| MDR/TAP (TAP1) | | | |
| Mitogen-activated protein kinase kinase kinase 8 | CD, UC | 59, 60 | 37 |
| (MAP3K8) | | | |
| Ubiquitin D\| | CD, UC | 61, 62 | 38 |
| Gamma-aminobutyric acid GABA B receptor, 1 | | | |
| (UBD\|GABBR1) | | | |
| DEAH Asp-Glu-Ala-Asp/His box polypeptide 57 | CD, UC | 63, 64 | 39 |
| (DHX57) | | | |
| Metastasis-associate (MA) | CD, UC | 65, 66 | 40 |
| LY6/PLAUR domain containing 5 (LYPD5) | | | |
| Immunoglobulin lambda joining-constant/OR18 | CD, UC | 67, 68 | 41 |
| (IGLJCOR18) | | | |
| TNF R superfamily, member 6b, decoy (TNFRSF6B) | CD, UC | 69, 70 | 42 |
| serum amyloid A1 (SAA1) | CD, UC | 71, 72 | 43 |
| Transporter 2, ATP-binding cassette, sub-family B | CD, UC | 73, 74 | 44 |
| MDR/TAP (TAP2) | | | |
| PCAA17448 | CD, UC | 75, 76 | 45 |
| lipocalin 2 oncogene 24p3 (LCN2) | CD, UC | 77, 78 | 46 |
| Z-D binding protein 1 (ZBP1) | CD, UC | 79, 80 | 47 |
| TNFAIP3 interacting protein 3 (TNIP3) | CD, UC | 81, 82 | 48 |
| Zinc finger CCCH-type containing 12A (ZC3H12A) | CD, UC | 83, 84 | 49 |
| Chitinase 3-like 1 cartilage glycoprotein-39 | CD, UC | 85, 86 | 50 |
| (CHI3L1) | | | |
| Fc fragment of IgG low affinity IIIa, receptor CD16a | CD, UC | 87, 88 | 51 |
| (FCGR3A) | | | |
| Sterile alpha motif domain containing 9-like | CD, UC | 89, 90 | 52 |
| (SAMD9L) | | | |
| Matrix metalloproteinase 9 gelatinase B, 92 kDa | CD | 91, 92 | 53 |
| gelatinase, 92 kDa type IV collagenase (MMP9) | | | |
| Matrix metalloproteinase 7 matrilysin, uterine | CD, UC | 93, 94 | 54 |
| (MMP7) | | | |
| B-factor, properdin (BF) | CD, UC | 95, 96 | 55 |
| S100 calcium binding protein P (S100P) | CD, UC | 97, 98 | 56 |
| Growth regulated protein (GRO) | CD, UC | 99, 100 | 57 |
| Indoleamine-pyrrole 2,3 dioxygenase INDO (INDO) | CD, UC | 101, 102 | 58 |
| Tripartite motif-containing 22 (TRIM22) | CD, UC | 103, 104 | 59 |
| Serum amyloid A2 (SAA2) | CD, UC | 105, 106 | 60 |
| Arrestin domain containing 5 (ARRDC5) | CD, DC | 193, 194 | 110 |
| (LOC342959) | | | |
| ataxin 3-like (ATXN3L) (A_24_P910246) | CD, UC | 195 | 111 |
| follicle stimulating hormone receptor (FSHR) | CD, UC | 196, 197 | 112 |
| (LOC92552) | | | |
| platelet-derived growth factor receptor, alpha | CD, UC | 198, 199 | 113 |
| polypeptide (PDGFRA) | | | |
| transforming growth factor beta 3 (TGFB3) | CD, UC | 200, 201 | 114 |
| potassium channel tetramerisation domain containing | CD, UC | 202, 203 | 115 |
| 8 (KCTD8) | | | |
| transglutaminase 4 (TGM4) | CD, UC | 204, 205 | 116 |
| TPD52L3 tumor protein D52-like 3 (NYD-SP25) | CD, UC | 206, 207 | 117 |
| misc_RNA (C3orf53) (FLJ33651) | CD, UC | 208 | 118 |
| EMX2 opposite strand (non-protein coding) | CD, UC | 209 | 119A |
| (EMX2OS) on chromosome 10 | | | |
| S100A8 | UC | 231, 232 | 130 |
| CCL20 | UC | 233, 234 | 131 |

[0240] Table 1B provides a list of genes that are downpregulated in IBD.

| | | SEQ ID NO | |
|---|---|---|---|
| | | nucleic acid, | |
| Gene | Indication(s) | amino acid | FIG. |
| Sialidase 4 (NEU4) | CD, UC | 107, 108 | 61 |
| wingless-type MMTV integration site family, | CD, UC | 210, 211 | 120 |
| member 16 (WNT16) | | | |
| sprouty-related, EVH1 domain containing 2 | CD, UC | 212, 213 | 121 |
| (SPRED2) | | | |
| chromosome 16 open reading frame 65 (C16orf65) | CD, UC | 214, 215 | 122 |
| (MGC50721) | | | |
| chromosome 12 open reading frame 2 (C12orf2) | CD, UC | 216, 217 | 123 |
| multiple PDZ domain protein (MPDZ) | CD, UC | 218, 219 | 124 |
| phenylalanine-tRNA synthetase 2 (FARS2) | CD, UC | 220, 221 | 125 |
| caspase 8, apoptosis-related cysteine protease | CD, UC | 222, 223 | 126 |
| (CASP8) | | | |
| 5′-nucleotidase, ecto (CD73)(NT5E) | CD, UC | 224, 225 | 127 |
| teratocarcinoma-derived growth factor 3 | CD, UC | 226 | 128 |
| (TDGF3) | | | |
| butyrophilin-like 3 (BTNL3) | CD, UC | 227, 228 | 129 |

[0241] Table 2 provides a list of genes that are upregulated in IBD. These genes were identified from the immune response in silico (IRIS) collection of genes (Abbas, A. et al. Genes and Immunity, 6:319-331 (2005) hereby incorporated by reference in its entirety).

TABLE 2

| | | SEQ ID NO | |
|---|---|---|---|
| | | nucleic acid, | |
| Gene | Indication(s) | amino acid | FIG. |
| Immunoglobulin domain | CD, UC | 109, 110 | 62 |
| IRTA2/FCRH5 | | | |
| Immunoglobulin lambda | CD, UC | 111, 112 | 63 |
| joining-constant/OR18 | | | |
| (IGLJCOR18) | | | |
| Immunoglobulin heavy variable | CD, UC | 113, 114 | 64 |
| 4-4 (IGHV4-4) | | | |
| Matrix metalloproteinase 9 gelatinase | CD, UC | 115, 116 | 65 |
| B, 92 kDa gelatinase, 92 kDa type IV | | | |
| collagenase (MMP9) | | | |
| Growth regulated protein (GRO) | CD, UC | 117, 118 | 66 |
| Growth regulated protein gamma | CD, UC | 119, 120 | 67 |
| (MIP2BGRO-g) | | | |
| interleukin 1, beta (IL1B) | CD, UC | 121, 122 | 68 |
| IL-3 receptor, alpha low affinity | CD, UC | 123, 124 | 69 |
| (IL3RA) | | | |
| Caspase 1, apoptosis-related cysteine | CD, UC | 125, 126 | 70 |
| protease interleukin 1, beta, | | | |
| convertase (CASP1) | | | |
| Bv8 protein (BV8) | CD, UC | 127, 128 | 71 |

[0242] Table 3A provides a list of genes that are upregulated in IBD and were identified based on the experiments described in Example 2. In some instances, the locus/chromosome of the gene is provided.

TABLE 3A

| | | Locus/ | SEQ ID NO | |
|---|---|---|---|---|
| | | Chromosome | nucleic acid, amino | |
| Gene | Indication(s) | (if known) | acid | FIG. |
| HDAC7A | UC | IBD2/12 | 129, 130 | 72 |
| ACVRL1 | UC | IBD2/12 | 131, 132 | 73 |
| NR4A1 | UC | IBD2/12 | 133, 134 | 74 |
| K5B | UC | IBD2/12 | 135, 136 | 75 |
| SILV | UC | IBD2/12 | 137, 138 | 76 |
| IRAK3 | UC | IBD2/12 | 139, 140 | 77 |
| IL-4 | UC | IBD5/5 | 141, 142 | 78 |
| IL-13 | UC | IBD5/5 | 143, 144 | 79 |
| RAD50 | UC | IBD5/5 | 145, 146 | 80 |
| IL-5 | UC | IBD5/5 | 147, 148 | 81 |
| IRF1 | UC | IBD5/5 | 149, 150 | 82 |
| PDLIM4 | UC | IBD5/5 | 151, 152 | 83 |
| CSF2 | UC | IBD5/5 | 153, 154 | 84 |
| IL-3 | UC | IBD5/5 | 155, 156 | 85 |
| MMP3 | UC | | 157, 158 | 86 |
| IL-8 | UC | | 159, 160 | 87 |
| TLR4 | UC | | 161, 162 | 88 |
| HLA-DRB1 | UC | | 163, 164 | 89 |
| MMP19 | UC | | 165, 166 | 90 |
| TIMP1 | UC | | 167, 168 | 91 |
| Elfin | UC | | 169, 170 | 92 |
| CXCL1 | UC | | 171, 172 | 93 |

[0243] Table 3B provides a list of genes that are down-regulated in IBD and were identified based on the experiments described in Example 2. In some instances, the locus/chromosome of the gene is provided.

TABLE 3B

| | | | SEQ ID NO | |
|---|---|---|---|---|
| | | Locus/ | nucleic acid, | |
| Gene | Indication(s) | Chromosome | amino acid | FIG. |
| DFKZP586A0522 | UC | IBD2/12 | 173, 174 | 94 |
| SLC39A5 | UC | IBD2/12 | 175, 176 | 95 |
| GLI-1 | UC | IBD2/12 | 177, 178 | 96 |
| HMGA2 | UC | IBD2/12 | 179, 180 | 97 |
| SLC22A5 | UC | IBD5/5 | 181, 182 | 98 |
| SLC22A4 | UC | IBD5/5 | 183, 184 | 99 |
| P4HA2 | UC | IBD5/5 | 185, 186 | 100 |
| TSLP | UC | | 187, 188 | 101 |
| tubulin alpha 5/alpha 3 | UC | | 189, 190 | 102 |
| tubulin alpha 6 | UC | | 191, 192 | 103 |

[0244] a. Biomarkers of the Invention

[0245] “The present invention provides numerous gene expression markers or biomarkers for IBD listed in Tables 1A, 1B, 2, 3A, and 3B. In one embodiment of the present invention, the biomarkers are suitable for use in a panel of markers (as described herein). Such panels may include one or more markers from Table 1A; one or more markers from “Table 1B; the marker from Table 2; one or markers from Table 3A; and one or more markers from Table 3B. In addition, the present invention also contemplates panels of markers selected from two or more of Tables 1A, 1B, 2, 3A, and 3B. For example, a panel might contain one or more markers from Table 1A and one or more markers from Table 1B; or one or more markers from Table 1A and the marker from Table 2; or one or more markers from Table 1B and the marker from “Table 2; or one or more markers from Table 1A and one or more markers from Table 3A, etc. Those of ordinary skill in the art will appreciate the various combinations of biomarkers from Tables 1-3 that are suitable for use in the panels described herein.

[0246] In one embodiment of the present invention, a preferred set of IBD markers identified by microarray analysis, includes markers that are upregulated in an IBD. Preferably, the set of upregulated markers includes DEFA5 (SEQ ID NOS:3-4), DEFA6(SEQ ID NO:1-2). TNIP3(SEQ ID NO:81-82), REG3-gamma(SEQ ID NO:9-10). MMP7(SEQ ID NO:93-94), and SAA1(SEQ ID NO:71-72) in Table 1A; and IL-8(SEQ ID NO:159-160), Keratin 5B (K5B)(SEQ ID NO:135-136), SLC22A4(SEQ ID NO:183-184), SLC22A5(SEQ ID NO:181-182), MMP3(SEQ ID NO:157-158), and MMP19(SEQ ID NO:165-166) in “Tables 3A. A preferred downregulated marker is GLI-1 (SEQ ID NO:175-176) in in “Table 3B. A panel of biomarkers as described herein may include one of, more than one of, or all of these markers. Alternatively, the set of markers include 1, 2, 3, 4, 5, 6 of the indicated markers from Table 1A, and/or 1, 2, 3, 4, 5, 6 of the indicated markers from Table 3A and/or 1 or 2 of the indicated markers in “Table 3B.

[0247] Members of lists provided above, as single markers or in any combination, are preferred for use in prognostic and diagnostic assays of the present invention. The IBD markers of the present invention are differentially expressed genes or regions of genes. A differential level of expression of one or more markers in a test sample from a mammalian subject relative to a control can determined from the level of RNA transcripts or expression products detected by one or more of the methods described in further detail below.

[0248] Based on evidence of differential expression of RNA transcripts in normal cells and cells from a mammalian subject having IBD, the present invention provides gene markers for IBD. The IBD markers and associated information provided by the present invention allow physicians to make more intelligent treatment decisions, and to customize the treatment of IBD to the needs of individual patients, thereby maximizing the benefit of treatment and minimizing the exposure of patients to unnecessary treatments, which do not provide any significant benefits and often carry serious risks due to toxic side-effects.

[0249] Multi-analyte gene expression tests can measure the expression level of one or more genes involved in each of several relevant physiologic processes or component cellular characteristics. In some instances the predictive power of the test, and therefore its utility, can be improved by using the expression values obtained for individual genes to calculate a score which is more highly correlated with outcome than is the expression value of the individual genes. For example, the calculation of a quantitative score (recurrence score) that predicts the likelihood of recurrence in estrogen receptor-positive, node-negative breast cancer is describe in U.S. Published Patent Application No. 20050048542. The equation used to calculate such a recurrence score may group genes in order to maximize the predictive value of the recurrence score. The grouping of genes may be performed at least in part based on knowledge of their contribution to physiologic functions or component cellular characteristics such as discussed above. The formation of groups, in addition, can facilitate the mathematical weighting of the contribution of various expression values to the recurrence score. The weighting of a gene group representing a physiological process or component cellular characteristic can reflect the contribution of that process or characteristic to the pathology of the IBD and clinical outcome. Accordingly, in an important aspect, the present invention also provides specific groups of the genes identified herein, that together are more reliable and powerful predictors of outcome than the individual genes or random combinations of the genes identified.

[0250] In addition, based on the determination of a recurrence score, one can choose to partition patients into subgroups at any particular value(s) of the recurrence score, where all patients with values in a given range can be classified as belonging to a particular risk group. Thus, the values chosen will define subgroups of patients with respectively greater or lesser risk.

[0251] The utility of a gene marker in predicting the development or progression of an IBD may not be unique to that marker. An alternative marker having a expression pattern that is closely similar to a particular test marker may be substituted for or used in addition to a test marker and have little impact on the overall predictive utility of the test. The closely similar expression patterns of two genes may result from involvement of both genes in a particular process and/or being under common regulatory control. The present invention specifically includes and contemplates the use of such substitute genes or gene sets in the methods of the present invention.

[0252] The markers and associated information provided by the present invention predicting the development and/or progression of an IBD also have utility in screening patients for inclusion in clinical trials that lest the efficacy of drug compounds for the treatment of patients with IBD.

[0253] The markers and associated information provided by the present invention predicting the presence, development and/or progression of an IBD are useful as criterion for determining whether IBD treatment is appropriate. For example, IBD treatment may be appropriate where the results of the test indicate that an IBD marker is differentially expressed in a lest sample from an individual relative to a control sample. The individual may be an individual not known to have an IBD, an individual known to have an IBD, an individual previously diagnosed with an IBD undergoing treatment for the IBD, or an individual previously diagnosed with an IBD and having had surgery to address the IBD. In addition, the present invention contemplates methods of treating an IBD. As described below, the diagnostic methods of the present invention may further comprise the step of administering an IBD therapeutic agent to the mammalian subject that provided the test sample in which the differential expression of one or more IBD markers was observed relative to a control. Such methods of treatment would therefore comprise (a) determining the presence of an IBD in a mammalian subject, and (b) administering an IBD therapeutic agent to the mammalian subject.

[0254] In another embodiment, the IBD markers and associated information are used to design or produce a reagent that modulates the level or activity of the gene's transcript or its expression product. Said reagents may include but are not limited to an antisense RNA, a small inhibitory RNA (siRNA), a ribozyme, a monoclonal or polyclonal antibody. In a further embodiment, said gene or its transcript, or more particularly, an expression product of said transcript is used in an (screening) assay to identify a drug compound, wherein said drug compounds is used in the development of a drug to treat an IBD.

[0255] In various embodiments of the inventions, various technological approaches described below are available for determination of expression levels of the disclosed genes. In particular embodiments, the expression level of each gene may be determined in relation to various features of the expression products of the gene including exons, introns, protein epitopes and protein activity. In other embodiments, the expression level of a gene may be inferred from analysis of the structure of the gene, for example from the analysis of the methylation pattern of gene's promoter(s).

[0256] b. Diagnostic Methods of the Invention

[0257] The present invention provides methods of detecting or diagnosing an IBD in a mammalian subject based on differential expression of an IBD marker. In a one embodiment, the methods comprise the use of a panel of IBD markers as discussed above. The panels may include one or more IBD markers selected from Tables 1-3.

[0258] In some embodiments, the panel of IBD markers will include at least 1 IBD marker, at least two IBD markers, at least three IBD markers, at least 4 IBD markers, at least five IBD markers, at least 6 IBD markers, at least 7 IBD marker, at least 8 IBD markers, at least 9 IBD markers, at least 10 IBD markers, at least 11 IBD markers, at least 12 IBD markers, at least 13 IBD markers, at least 14 IBD markers, at least 15 IBD markers, at least 16 IBD markers, at least 17 IBD markers, at least 18 IBD markers, at least 19 IBD markers, or at least 20 IBD markers. In one embodiment, the panel includes markers in increments of five. In another embodiment, the panel includes markers in increments of ten. The panel may include an IBD marker that is overexpressed in IBD relative to a control, an IBD marker that is underexpressed in IBD relative to a control, or IBD markers that are both overexpressed and underexpressed in IBD relative to a control. In a preferred embodiment, the panel includes one or more markers that are upregulated in CD and one or more markers that are downregulated in CD. In another preferred embodiment, the panel includes one or more markers that are upregulated in UC and one or more markers that are downregulated in UC.

[0259] In another embodiment, the panels of the present invention may include an IBD marker that is overexpressed in an active IBD relative to a control, underexpressed in an active IBD relative to a control, or IBD markers that are both overexpressed and underexpressed in an active IBD relative to a control. In another embodiment, the panels of the present invention may include an IBD marker that is overexpressed in an inactive IBD relative to a control, underexpressed in an inactive IBD relative to a control, or IBD markers that are both overexpressed and underexpressed in an inactive IBD relative to a control. In a preferred embodiment, the active IBD is CD. In another preferred embodiment, the inactive IBD is CD.

[0260] In a preferred embodiment, the methods of diagnosing or detecting the presence of an IBD in a mammalian subject comprise determining a differential expression level of RNA transcripts or expression products thereof from a panel of IBD markers in a test sample obtained from the subject relative to the level of expression in a control, wherein the differential level of expression is indicative of the presence of an IBD in the subject from which the test sample was obtained. The differential expression in the test sample may be higher and/or lower relative to a control as discussed herein.

[0261] Differential expression or activity of one or more of the genes provided in the lists above, or the corresponding RNA molecules or encoded proteins in a biological sample obtained from the patient, relative to control, indicates the presence of an IBD in the patient. The control can, for example, be a gene, present in the same cell, which is known to be up-regulated (or down-regulated) in an IBD patient (positive control). Alternatively, or in addition, the control can be the expression level of the same gene in a normal cell of the same cell type (negative control). Expression levels can also be normalized, for example, to the expression levels of housekeeping genes, such as glyceraldehyde-3-phosphate-dehydrogenase (GAPDH) and/or β-actin, or to the expression levels of all genes in the sample tested. In one embodiment, expression of one or more of the above noted genes is deemed positive expression if it is at the median or above, e.g. compared to other samples of the same type. The median expression level can be determined essentially contemporaneously with measuring gene expression, or may have been determined previously. These and other methods are well known in the art, and are apparent to those skilled in the art.

[0262] Methods for identifying IBD patients are provided herein. Of this patient population, patients with an IBD can be identified by determining the expression level of one or more of the genes, the corresponding RNA molecules or encoded proteins in a biological sample comprising cells obtained from the patient. The biological sample can, for example, be a tissue biopsy as described herein.

[0263] The methods of the present invention concern IBD diagnostic assays, and imaging methodologies. In one embodiment, the assays are performed using antibodies as described herein. The invention also provides various immunological assays useful for the detection and quantification of proteins. These assays are performed within various immunological assay formats well known in the art, including but not limited to various types of radioimmunoassays, enzyme-linked immunosorbent assays (ELISA), enzyme-linked immunofluorescent assays (ELIFA), and the like. In addition, immunological imaging methods capable of detecting an IBD characterized by expression of a molecule described herein are also provided by the invention, including but not limited to radioscintigraphic imaging methods using labeled antibodies. Such assays are clinically useful in the detection, monitoring, diagnosis and prognosis of IBD characterized by expression of one or more molecules described herein.

[0264] Another aspect of the present invention relates to methods for identifying a cell that expresses a molecule described herein. The expression profile of a molecule(s) described herein make it a diagnostic marker for IBD. Accordingly, the status of the expression of the molecule(s) provides information useful for predicting a variety of factors including susceptibility to advanced stages of disease, rate of progression, and/or sudden and severe onset of symptoms in an active IBD or an inactive IBD, i.e. flare-ups.

[0265] In one embodiment, the present invention provides methods of detecting an IBD. A test sample from a mammalian subject and a control sample from a known normal mammal are each contacted with an anti-IBD marker antibody or a fragment thereof The level of IBD marker expression is measured and a differential level of expression in the test sample relative to the control sample is indicative of an IBD in the mammalian subject from which the test sample was obtained. In some embodiments, the level of IBD marker expression in the test sample is determined to be higher than the level of expression in the control, wherein the higher level of expression indicates the presence of an IBD in the subject from which the test sample was obtained. In another embodiments, the level of IBD marker expression in the test sample is determined to be lower than the level of expression in the control, wherein the lower level of expression indicates the presence of an IBD in the subject from which the test sample was obtained.

[0266] In another embodiment, the IBD detected by the methods of the present invention is the recurrence or flareup of an IBD in the mammalian subject.

[0267] In preferred embodiments, the methods are employed to detect the flare-up of an IBD or a recurrence of an IBD in a mammalian subject previously determined to have an IBD who underwent treatment for the IBD, such as drug therapy or a surgical procedure. Following initial detection of an IBD, additional test samples may be obtained from the mammalian subject found to have an IBD. The additional sample may be obtained hours, days, weeks, or months after the initial sample was taken. Those of skill in the art will appreciate the appropriate schedule for obtaining such additional samples, which may include second, third, fourth, fifth, sixth, etc. test samples. The intial test sample and the additional sample (and alternately a control sample as described herein) are contacted with an anti-IBD marker antibody. The level of IBD marker expression is measured and a differential level of expression in the additional test sample as compared to the initial test sample is indicative of a flare-up in or a recurrence of an IBD in the mammalian subject from which the test sample was obtained.

[0268] In one aspect, the methods of the present invention are directed to a determining step. In one embodiment, the determining step comprises measuring the level of expression of one or more IBD markers in a test sample relative to a control. Typically, measuring the level of IBD marker expression, as described herein, involves analyzing a test sample for differential expression of an IBD marker relative to a control by performing one or more of the techniques described herein. The expression level data obtained from a test sample and a control are compared for differential levels of expression. In another embodiment, the determining step further comprises an examination of the test sample and control expression data to assess whether an IBD is present in the subject from which the test sample was obtained.

[0269] In some embodiments, the determining step comprises the use of a software program executed by a suitable processor for the purpose of (i) measuring the differential level of IBD marker expression in a test sample and a control; and/or (ii) analyzing the data obtained from measuring differential level of IBD marker expression in a test sample and a control. Suitable software and processors are well known in the art and are commercially available. The program may be embodied in software stored on a tangible medium such as CD-ROM, a floppy disk, a hard drive, a DVD, or a memory associated with the processor, but persons of ordinary skill in the art will readily appreciate that the entire program or parts thereof could alternatively be executed by a device other than a processor, and/or embodied in firmware and/or dedicated hardware in a well known manner.

[0270] following the determining step, the measurement results, findings, diagnoses, predictions and/or treatment recommendations are typically recorded and communicated to technicians, physicians and/or patients, for example. In certain embodiments, computers will be used to communicate such information to interested parties, such as, patients and/or the attending physicians. In some embodiments, the assays will be performed or the assay results analyzed in a country or jurisdiction which differs from the country or jurisdiction to which the results or diagnoses are communicated.

[0271] In a preferred embodiment, a diagnosis, prediction and/or treatment recommendation based on the level of expression of one or more IBD markers disclosed herein measured in a test subject of having one or more of the IBD markers herein is communicated to the subject as soon as possible alter the assay is completed and the diagnosis and/or prediction is generated. The results and/or related information may be communicated to the subject by the subject's treating physician. Alternatively, the results may be communicated directly to a test subject by any means of communication, including writing, electronic forms of communication, such as email, or telephone. Communication may be facilitated by use of a computer, such as in case of email communications. In certain embodiments, the communication containing results of a diagnostic test and/or conclusions drawn from and/or treatment recommendations based on the test, may be generated and delivered automatically to the subject using a combination of computer hardware and software which will be familiar to artisans skilled in telecommunications. One example of a healthcare-oriented communications system is described in U.S. Pat. No. 6,283,761; however, the present invention is not limited to methods which utilize this particular communications system. In certain embodiments of the methods of the invention, all or some of the method steps, including the assaying of samples, diagnosing of diseases, and communicating of assay results or diagnoses, may be carried out in diverse (e.g., foreign) jurisdictions.

[0272] The invention provides assays for detecting the differential expression of an IBD marker in tissues associated with the gastrointestinal tract including, without limitation, ascending colon tissue, descending colon tissue, sigmoid colon tissue, and terminal ileum tissue; as well expression in other biological samples such as serum, semen, bone, prostate, urine, cell preparations, and the like. Methods for detecting differential expression of an IBD marker are also well known and include, for example, immunoprecipitation, immunohistochemical analysis, Western blot analysis, molecular binding assays, ELISA, ELIFA and the like. For example, a method of detecting the differential expression of an IBD marker in a biological sample comprises first contacting the sample with an anti-IBD marker antibody, an IBD marker-reactive fragment thereof, or a recombinant protein containing an antigen-binding region of an anit-IBD marker antibody; and then detecting the binding of an IBD marker protein in the sample.

[0273] In various embodiments of the inventions, various technological approaches are available for determination of expression levels of the disclosed genes, including, without limitation, RT-PCR, microarrays, serial analysis of gene expression (SAGE) and Gene Expression Analysis by Massively Parallel Signature Sequencing (MPSS), which will be discussed in detail below. In particular embodiments, the expression level of each gene may be determined in relation lo various features of the expression products of the gene including exons, introns, protein epitopes and protein activity. In other embodiments, the expression level of a gene may be inferred from analysis of the structure of the gene, for example from the analysis of the methylation pattern of gene's promoter(s).

[0274] c Therapeutic Methods of the Invention

[0275] The present invention provides therapeutic methods of treating an IBD in a subject in need that comprise detecting the presence of an IBD in a mammalian subject by the diagnostic methods described herein and then administering to the mammalian subject an IBD therapeutic agent. Those of ordinary skill in the art will appreciate the various IBD therapeutic agents that may be suitable for use in the present invention (see St Clair Jones, Hospital Pharmacist, May 2006, Vol. 13; pages 161-166, hereby incorporated by reference in its entirety). The present invention contemplates methods of IBD treatment in which one or more IBD therapeutic agents are administered to a subject in need. In one embodiment, the IBD therapeutic agent is one or more of an aminosalicylate, a corticosteroid, and an immunosuppressive agent. In a preferred embodiment, the aminosalicylate is one of sulfasalazine, olsalazine, mesalamine, balsalazide, and asacol. In another preferred embodiment, multiple aminosalicylates are co-administered, such as a combination of sulfasalazine and olsalazine. In other preferred embodiments, the corticosteroid may be budesonide, prednisone, prednisolone, methylprednisolone, 6-mercaptopurine (6-MP), azathioprine, methotrexate, and cyclosporin. In other preferred embodiments, the IBD therapeutic agent may an antibiotic, such as ciprofloxacin and/or metronidazole; or an antibody-based agent such as infliximab (Remicade®).

[0276] The least toxic IBD therapeutic agents which patients are typically treated with are the aminosalicylates. Sulfasalazine (Azulfidine), typically administered four times a day, consists of an active molecule of aminosalicylate (5-ASA) which is linked by an azo bond to a sulfapyridine. Anaerobic bacteria in the colon split the azo bond to release active 5-ASA. However, al least 20% of patients cannot tolerate sulfapyridinc because it is associated with significant side-effects such as reversible sperm abnormalities, dyspepsia or allergic reactions to the sulpha component. These side effects are reduced in patients taking olsalazine. However, neither sulfasalazine nor olsalazine are effective for the treatment of small bowel inflammation. Other formulations of 5-ASA have been developed which are released in the small intestine (e.g. mesalamine and asacol). Normally it takes 6-8 weeks for 5-ASA therapy to show full efficacy. Patients who do not respond to 5-ASA therapy, or who have a more severe disease, are prescribed corticosteroids. However, this is a short term therapy and cannot be used as a maintenance therapy. Clinical remission is achieved with corticosteroids within 2-4 weeks, however the side effects are significant and include Gushing goldface, facial hair, severe mood swings and sleeplessness. The response to sulfasalazine and 5-aminosalicylate preparations is poor in CD, fair to mild in early ulcerative colitis and poor in severe UC. If these agents fail, powerful immunosuppressive agents such as cyclosporine, prednisone, 6-mercaptopurine or azathioprine (converted in the liver to 6-mercaptopurine) are typically tried. For CD patients, the use of corticosteroids and other immunosuppressives must be carefully monitored because of the high risk of intra-abdominal sepsis originating in the fistulas and abscesses common in this disease. Approximately 25% of IBD patients will require surgery (colectomy) during the course of the disease.

[0277] Treatment of an IBD may include a surgical procedure, including without limitation, a bowel resection, anastomosis, a colectomy, a proctocolectomy, and an ostomy, or any combination thereof.

[0278] In addition to pharmaceutical medicine and surgery, nonconventional treatments for IBD such as nutritional therapy have also been attempted. For example, Flexical®, a semi-elemental formula, has been shown to be as effective as the steroid prednisolone. Sanderson et al., Arch. Dis. Child. 51:123-7 (1987). However, semi-elemental formulas are relatively expensive and are typically unpalatable—thus their use has been restricted. Nutritional therapy incorporating whole proteins has also been attempted to alleviate the symptoms of IBD. Giafer et al., Lancet 335: 816-9 (1990). U.S. Pat. No. 5,461,033 describes the use of acidic casein isolated from bovine milk and TGF-2. Beattie et al., Aliment. Pharmacol. Ther. 8: 1-6 (1994) describes the use of casein in infant formula in children with IBD. U.S. Pat. No. 5,952,295 describes the use of casein in an enteric formulation for the treatment of IBD. However, while nutrional therapy is non-toxic, it is a palliative treatment and does not treat the underlying cause of the disease.

[0279] The present invention contemplates methods of IBD treatment, including for example, in vitro, ex vivo and in vivo therapeutic methods. The invention provides methods useful for treating an IBD in a subject in need upon the detection of an IBD disease state in the subject associated with the expression of one or more IBD markers disclosed herein, such as increased and/or decreased IBD marker expression. In one preferred embodiment, the method comprises (a) determining that the level of expression of (i) one or more nucleic acids encoding one or more polypeptides selected from Tables 1, 2, or 3; or (ii) RNA transcripts or expression products thereof of one or more genes listed in Tables 1, 2, and 3 in a test sample obtained from said subject is higher and/or lower relative to the level of expression in a control, wherein said higher and/or lower level of expression is indicative of the presence of an IBD in the subject from which the test sample was obtained; and (b) administering to said subject an effective amount of an IBD therapeutic agent. The determining step (a) may comprise the measurement of the expression of multiple IBD marker

[0280] The method of treatment comprises detecting the IBD and administering an effective amount of an IBD therapeutic agent to a subject in need of such treatment. In some embodiments, the IBD disease state is associated with an increased and/or decrease in expression of one or more IBD markers.

[0281] In one aspect, the invention provides methods for treating or preventing an IBD, the methods comprising detecting the presence of an IBD in a subject and administering an effective amount of an IBD therapeutic agent to the subject. It is understood that any suitable IBD therapeutic agent may be used in the methods of treatment, including aminosalicylates, corticosteroids, and immunosuppressive agents as discussed herein.

[0282] In any of the methods herein, one may administer to the subject or patient along with a single IBD therapeutic agent discussed herein an effective amount of a second medicament (where the single IBD therapeutic agent herein is a first medicament), which is another active agent that can treat the condition in the subject that requires treatment, for instance, an aminosalicylate may be co-administered with a corticosteroid, an immunosuppressive agent, or another aminosalicylate. The type of such second medicament depends on various factors, including the type of IBD, its severity, the condition and age of the patient, the type and dose of first medicament employed, etc.

[0283] Such treatments using first and second medicaments include combined administration (where the two or more agents are included in the same or separate formulations), and separate administration, in which case, administration of the first medicament can occur prior to, and/or following, administration of the second medicament. In general, such second medicaments may be administered within 48 hours after the first medicaments are administered, or within 24 hours, or within 12 hours, or within 3-12 hours after the first medicament, or may be administered over a pre-selected period of time, which is preferably about 1 to 2 days, about 2 to 3 days, about 3 to 4 days, about 4 to 5 days, about 5 to 6 days, or about 6 to 7 days.

[0284] The first and second medicaments can be administered concurrently, sequentially, or alternating with the first and second medicament or upon non-responsiveness with other therapy. Thus, the combined administration of a second medicament includes co-administration (concurrent administration), using separate formulations or a single pharmaceutical formulation, and consecutive administration in either order, wherein preferably there is a time period while both (or all) medicaments simultaneously exert their biological activities. All these second medicaments may be used in combination with each other or by themselves with the first medicament, so that the express “second medicament” as used herein does not mean it is the only medicament besides the first medicament, respectively. Thus, the second medicament need not be one medicament, but may constitute or comprise more than one such drug. These second medicaments as set forth herein are generally used in the same dosages and with administration routes as the first medicaments, or about from 1 to 99% of the dosages of the first medicaments. If such second medicaments are used at all, preferably, they are used in lower amounts than if the first medicament were not present, especially in subsequent dosings beyond the initial dosing with the first medicament, so as to eliminate or reduce side effects caused thereby.

[0285] Where the methods of the present invention comprise administering one or more IBD therapeutic agent to treat or prevent an IBD, it may be particularly desirable to combine the administering step with a surgical procedure that is also performed to treat or prevent the IBD. The IBD surgical procedures contemplated by the present invention include, without limitation, a bowel resection, anastomosis, a colectomy, a proctocolectomy, and an ostomy, or any combination thereof. For instance, an IBD therapeutic agent described herein may be combined with a colectomy in a treatment scheme, e.g. in treating an IBD. Such combined therapies include and separate administration, in which case, administration of the IBD therapeutic agent can occur prior to, and/or following, the surgical procedure.

[0286] Treatment with a combination of one or more IBD therapeutic agents; or a combination of one or more IBD therapeutic agents and a surgical procedure described herein preferably results in an improvement in the signs or symptoms of an IBD, for instance, such therapy may result in an improvement in the subject receiving the IBD therapeutic agent treatment regimen and a surgical procedure, as evidenced by a reduction in the severity of the pathology of the IBD.

[0287] The IBD therapeutic agent(s) is/are administered by any suitable means, including parenteral, subcutaneous, intraperitoneal, intrapulmonary, and intranasal, and, if desired for local treatment, intralesional administration. Parenteral infusions include intramuscular, intravenous, intraarterial, intraperitoneal, or subcutaneous administration. Dosing can be by any suitable route, e.g. by injections, such as intravenous or subcutaneous injections, depending in part on whether the administration is brief or chronic.

[0288] The IBD therapeutic agent(s) compositions administered according to the methods of the invention will be formulated, dosed, and administered in a fashion consistent with good medical practice, factors for consideration in this context include the particular disorder being treated, the particular mammal being treated, the clinical condition of the individual patient, the cause of the disorder, the site of delivery of the agent, the method of administration, the scheduling of administration, and other factors known to medical practitioners. The first medicament(s) need not be, but is optionally formulated with one or more additional medicament(s) (e.g. second, third, fourth, etc. medicaments) described herein. The effective amount of such additional medicaments depends on the amount of the first medicament present in the formulation, the type of disorder or treatment, and other factors discussed above. These are generally used in the same dosages and with administration routes as used hereinbefore or about from 1 to 99% of the heretofore employed dosages.

[0289] For the prevention or treatment of an IBD, the appropriate dosage of an IBD therapeutic agent (when used alone or in combination with other agents) will depend on the type of disease to be treated, the type of IBD therapeutic agent(s), the severity and course of the disease, whether the IBD therapeutic agent is administered for preventive or therapeutic purposes, previous therapy, the patient's clinical history and response to the IBD therapeutic agent, and the discretion of the attending physician. The IBD therapeutic agent is suitably administered to the patient at one time or over a series of treatments. Depending on the type and severity of the disease, about 1 ug/kg to 15 mg/kg (e.g. 0.1 mg/kg-10 mg/kg) of IBD therapeutic agent is an initial candidate dosage for administration to the patient, whether, for example, by one or more separate administrations, or by continuous infusion. One typical daily dosage might range from about 1 ug/kg to 100 mg/kg or more, depending on the factors mentioned above, for repeated administrations over several days or longer, depending on the condition, the treatment is sustained until a desired suppression of disease symptoms occurs. One exemplary dosage of the IBD therapeutic agent would be in the range from about 0.05 mg/kg to about 10 mg/kg. Thus, one or more doses of about 0.5 mg/kg, 2.0 mg/kg, 4.0 mg/kg or 10 mg/kg (or any combination thereof) may be administered to the patient. Such doses may be administered intermittently, e.g. every week or every three weeks (e.g. such that the patient receives from about two to about twenty, e.g. about six doses of the IBD therapeutic agent). An initial higher loading dose, followed by one or more lower doses may be administered. An exemplary dosing regimen comprises administering an initial loading dose of about 4 mg/kg, followed by a weekly maintenance dose of about 2 mg/kg of the IBD therapeutic agent. However, other dosage regimens may be useful. The progress of this therapy is easily monitored by conventional techniques and assays.

### B.2. Gene Expression Profiling

[0290] In general, methods of gene expression profiling can be divided into two large groups: methods based on hybridization analysis of polynucleotides, and other methods based on biochemical detection or sequencing of polynucleotides. The most commonly used methods known in the art for the quantification of mRNA expression in a sample include northern blotting and in situ hybridization (Parker & Barnes, Methods in Molecular Biology 106:247-283 (1999)); RNAse protection assays (Hod, Biotechniques 13:852-854 (1992)); and reverse transcription polymerase chain reaction (RT-PCR) (Weis et al. Trends in Genetics 8:263-264 (1992)). Alternatively, antibodies may be employed that can recognize specific duplexes, including DNA duplexes, RNA duplexes, and DNA-RNA hybrid duplexes or DNA-protein duplexes. Various methods for determining expression of mRNA or protein include, but are not limited to, gene expression profiling, polymerase chain reaction (PCR) including quantitative real time PCR (qRT-PCR), microarray analysis that can be performed by commercially available equipment, following manufacturer's protocols, such as by using the Affymetrix GenChip technology, serial analysis of gene expression (SAGE) (Velculescu et al., Science 270:484-487 (1995); and Velculescu et al., Cell 88:243-51 (1997)), MassARRAY, Gene Expression Analysis by Massively Parallel Signature Sequencing (MPSS) (Brenner et al., Nature Biotechnology 18:630-634 (2000)), proteomics, immunohistochemistry (IHC), etc. Preferably mRNA is quantified. Such mRNA analysis is preferably performed using the technique of polymerase chain reaction (PCR), or by microarray analysis. Where PCR is employed, a preferred form of PCR is quantitative real time PCR (qRT-PCR).

[0291] a. Reverse Transcriptase PCR (RT-PCR)

[0292] Of the techniques listed above, the most sensitive and most flexible quantitative method is RT-PCR, which can be used to compare mRNA levels in different sample populations, in normal and test sample tissues, to characterize patterns of gene expression, to discriminate between closely related mRNAs, and to analyze RNA structure.

[0293] The first step is the isolation of mRNA from a target sample. The starting material is typically total RNA isolated from colonic tissue biopsies. Thus, RNA can be isolated from a variety of tissues, including without limitation, the terminal ileum, the ascending colon, the descending colon, and the sigmoid colon. In addition, the colonic tissue from which a biopsy is obtained may be from an inflamed and/or a non-inflamed colonic area.

[0294] In one embodiment, the mRNA is obtained from a biopsy as defined above wherein the biopsy is obtained from the left colon or from the right colon. As used herein, the “left colon” refers to the sigmoideum and reclosigmoideum and the “right colon” refers to the cecum.

[0295] General methods for mRNA extraction are well known in the art and are disclosed in standard textbooks of molecular biology, including Ausubel et al., Current Protocols of Molecular Biology, John Wiley and Sons (1997). In particular, RNA isolation can be performed using purification kit, buffer set and protease from commercial manufacturers, such as Qiagen, according to the manufacturer's instructions. Total RNA from tissue samples can be isolated using RNA Stat-60 (Tel-Test). RNA prepared from a biopsy can be isolated, for example, by cesium chloride density gradient centrifugation.

[0296] As RNA cannot serve as a template for PCR, the first step in gene expression profiling by RT-PCR is the reverse transcription of the RNA template into cDNA, followed by its exponential amplification in a PCR reaction. The two most commonly used reverse transcriptases are avilo mycloblastosis virus reverse transcriptase (AMV-RT) and Moloney murine leukemia virus reverse transcriptase (MMLV-RT). The reverse transcription step is typically primed using specific primers, random hexamers, or oligo-dT primers, depending on the circumstances and the goal of expression profiling, for example, extracted RNA can be reverse-transcribed using a GeneAmp RNA PCR kit (Perkin Elmer, Calif., USA), following the manufacturer's instructions. The derived cDNA can then be used as a template in the subsequent PCR reaction.

[0297] Although the PCR step can use a variety of thermostable DNA-dependent DNA polymerases, it typically employs the Taq DNA polymerase, which has a 5′-3′ nuclease activity but lacks a 3′-5′ proofreading endonuclease activity. Thus, TaqMan® PCR typically utilizes the 5′-nuclease activity of Taq or Tth polymerase to hydrolyze a hybridization probe bound to its target amplicon, but any enzyme with equivalent 5′ nuclease activity can be used. Two oligonucleotide primers are used to generate an amplicon typical of a PCR reaction. A third oligonucleotide, or probe, is designed to detect nucleotide sequence located between the two PCR primers. The probe is non-extendible by Taq DNA polymerase enzyme, and is labeled with a reporter fluorescent dye and a quencher fluorescent dye. Any laser-induced emission from the reporter dye is quenched by the quenching dye when the two dyes are located close together as they are on the probe. During the amplification reaction, the Taq DNA polymerase enzyme cleaves the probe in a template-dependent manner. The resultant probe fragments disassociate in solution, and signal from the released reporter dye is free from the quenching effect of the second fluorophore. One molecule of reporter dye is liberated for each new molecule synthesized, and detection of the unquenched reporter dye provides the basis for quantitative interpretation of the data.

[0298] TaqMan® RT-PCR can be performed using commercially available equipment, such as, for example, ABI PRISM 7700™ Sequence Detection System™ (Perkin-Elmer-Applied Biosystems, Foster City, Calif., USA), or Lightcycler (Roche Molecular Biochemicals. Mannheim, Germany). In a preferred embodiment, the 5′ nuclease procedure is run on a real-time quantitative PCR device such as the ABI PRISM 7700™ Sequence Detection System™. The system consists of a thermocycler, laser, charge-coupled device (CCD), camera and computer. The system amplifies samples in a 96-well format on a thermocycler. During amplification, laser-induced fluorescent signal is collected in real-time through fiber optics cables for all 96 wells, and detected at the CCD. The system includes software for running the instrument and for analyzing the data.

[0299] 5′-Nuclease assay data are initially expressed as Ct, or the threshold cycle. As discussed above, fluorescence values are recorded during every cycle and represent the amount of product amplified to that point in the amplification reaction. The point when the fluorescent signal is first recorded as statistically significant is the threshold cycle (Ct).

[0300] To minimize errors and the effect of sample-to-sample variation, RT-PCR is usually performed using an internal standard. The ideal internal standard is expressed at a constant level among different tissues, and is unaffected by the experimental treatment. RNAs most frequently used to normalize patterns of gene expression are mRNAs for the housekeeping genes glyceraldehyde-3-phosphate-dehydrogenase (GAPDH) and β-actin.

[0301] A more recent variation of the RT-PCR technique is the real time quantitative PCR, which measures PCR product accumulation through a dual-labeled fluorigenic probe (i.e., TaqMan® probe). Real time PCR is compatible both with quantitative competitive PCR, where internal competitor for each target sequence is used for normalization, and with quantitative comparative PCR using a normalization gene contained within the sample, or a housekeeping gene for RT-PCR. For further details see, e.g. Held et al., Genome Research 6:986-994 (1996).

[0302] According to one aspect of the present invention, PCR primers and probes are designed based upon nitron sequences present in the gene to be amplified. In this embodiment, the first step in the primer/probe design is the delineation of intron sequences within the genes. This can be done by publicly available software, such as the DNA BLAT software developed by Kent, W. J., Genome Res. 12(4):656-64 (2002), or by the BLAST software including its variations. Subsequent steps follow well established methods of PCR primer and probe design.

[0303] In order to avoid non-specific signals, it is important to mask repetitive sequences within the introns when designing the primers and probes. This can be easily accomplished by using the Repeat Masker program available on-line through the Baylor College of Medicine, which screens DNA sequences against a library of repetitive elements and returns a query sequence in which the repetitive elements are masked. The masked intron sequences can then be used to design primer and probe sequences using any commercially or otherwise publicly available primer/probe design packages, such as Primer Express (Applied Biosystems): MGB assay-by design (Applied Biosystems); Primer3 (Steve Rozen and Helen J. Skaletsky (2000) Primer3 on the WWW for general users and for biologist programmers. In: Krawetz S, Misener S (eds) Bioinformatics Methods and Protocols: Methods in Molecular Biology. Humane Press, Totowa, N. J., pp 365-386).

[0304] The most important factors considered in PCR primer design include primer length, melting temperature (Tm), and G/C content, specificity, complementary primer sequences, and 3′-end sequence. In general, optimal PCR primers are generally 17-30 bases in length, and contain about 20-80%, such as, for example, about 50-60% G+C bases. Tm's between 50 and 80° C., e.g. about 50 to 70° C. are typically preferred.

[0305] For further guidelines for PCR primer and probe design see, e.g. Dieffenbach, C. W. et al., “General Concepts for PCR Primer Design” in: PCR Primer, A Laboratory Manual, Cold Spring Harbor Laboratory Press, New York, 1995, pp. 133-155; Innis and Gelfand, “Optimization of PCRs” in: PCR Protocols, A Guide to Methods and Applications, CRC Press. London, 1994, pp. 5-11; and Plasterer, T. N. Primerselect: Primer and probe design. Methods Mol. Biol. 70:520-527 (1997), the entire disclosures of which are hereby expressly incorporated by reference.

[0306] Further PCR-based techniques include, for example, differential display (Liang and Pardee, Science 257:967-971 (1992)); amplified fragment length polymorphism (iAFLP) (Kawamoto et al., Genome Res. 12:1305-1312 (1999)); BeadArray® technology (Illumina, San Diego, Calif.; Oliphant et al., Discovery of Markers for Disease (Supplement to Biotechniques), June 2002; Ferguson et al., Analytical Chemistry 72:5618 (2000)); BeadsArray for Detection of Gene Expression (BADGE), using the commercially available Luminex100 LabMAP system and multiple color-coded microspheres (Fuminex Corp., Austin, Tex.) in a rapid assay for gene expression (Yang et al., Genome Res. 11:1888-1898 (2001)); and high coverage expression profiling (HiCFP) analysis (Fukumura et al., Nuel. Acids. Res. 31(16) e94 (2003)).

[0307] b. Microarrays

[0308] Differential gene expression can also be identified, or confirmed using the microarray technique. Thus, the expression profile of IBD-associated genes can be measured in either fresh or paraffin-embedded tissue, using microarray technology. In this method, polynucleotide sequences of interest (including cDNAs and oligonucleotides) are plated, or arrayed, on a microchip substrate. The arrayed sequences are then hybridized with specific DNA probes from cells or tissues of interest. Just as in the RT-PCR method, the source of mRNA typically is total RNA isolated from biopsy tissue or cell lines derived from cells obtained from a subject having an IBD, and corresponding normal tissues or cell lines. Thus RNA can be isolated from a variety of colonic tissues or colonic tissue-based cell lines.

[0309] In a specific embodiment of the microarray technique, PCR amplified inserts of cDNA clones are applied to a substrate in a dense array. Preferably at least 10,000 nucleotide sequences are applied to the substrate. The microarrayed genes, immobilized on the microchip at 10,000 elements each, are suitable for hybridization under stringent conditions. Fluorescently labeled cDNA probes may be generated through incorporation of fluorescent nucleotides by reverse transcription of RNA extracted from tissues of interest. Fabeled cDNA probes applied to the chip hybridize with specificity to each spot of DNA on the array. After stringent washing to remove non-specifically bound probes, the chip is scanned by confocal laser microscopy or by another detection method, such as a CCD camera. Quantitation of hybridization of each arrayed element allows for assessment of corresponding mRNA abundance. With dual color fluorescence, separately labeled cDNA probes generated from two sources of RNA are hybridized pairwise to the array. The relative abundance of the transcripts from the two sources corresponding to each specified gene is thus determined simultaneously. The miniaturized scale of the hybridization affords a convenient and rapid evaluation of the expression pattern for large numbers of genes. Such methods have been shown to have the sensitivity required to detect rare transcripts, which are expressed at a few copies per cell, and to reproducibly detect at least approximately two-fold differences in the expression levels (Schena et al., Proc. Natl. Acad. Sci. USA 93(2): 106-149 (1996)). Microarray analysis can be performed by commercially available equipment, following manufacturer's protocols, such as by using the Affymetrix GenChip technology, or Ineyte's microarray technology, or Agilent's Whole Human Genome microarray technology.

[0310] c. Serial Analysis of Gene Expression (SAGE)

[0311] Serial analysis of gene expression (SAGE) is a method that allows the simultaneous and quantitative analysis of a large number of gene transcripts, without the need of providing an individual hybridization probe for each transcript. First, a short sequence tag (about 10-14 bp) is generated that contains sufficient information to uniquely identify a transcript, provided that the tag is obtained from a unique position within each transcript. Then, many transcripts are linked together to form long serial molecules, that can be sequenced, revealing the identity of the multiple tags simultaneously. The expression pattern of any population of transcripts can be quantitatively evaluated by determining the abundance of individual tags, and identifying the gene corresponding to each tag. For more details see, e.g. Velculescu et al., Science 270:484-487 (1995); and Velculescu et al., Cell 88:243-51 (1997).

[0312] d. MassARRAY Technology

[0313] In the MassARRAY-based gene expression profiling method, developed by Sequenom, Inc. (San Diego, Calif.) following the isolation of RNA and reverse transcription, the obtained cDNA is spiked with a synthetic DNA molecule (competitor), which matches the targeted cDNA region in all positions, except a single base, and serves as an internal standard. The cDNA/competitor mixture is PCR amplified and is subjected to a post-PCR shrimp alkaline phosphatase (SAP) enzyme treatment, which results in the dephosphorylation of the remaining nucleotides. After inactivation of the alkaline phosphatase, the PCR products from the competitor and cDNA are subjected to primer extension, which generates distinct mass signals for the competitor- and cDNA-derives PCR products. After purification, these products are dispensed on a chip array, which is pre-loaded with components needed for analysis with matrix-assisted laser desorption ionization time-of-flight mass spectrometry (MALDI-TOF MS) analysis. The cDNA present in the reaction is then quantified by analyzing the ratios of the peak areas in the mass spectrum generated, for further details see, e.g. Ding and Cantor, Proc. Natl. Acad. Sci. USA 100:3059-3064 (2003).

[0314] e. Gene Expression Analysis by Massively Parallel Signature Sequencing (MPSS)

[0315] This method, described by Brenner et al., Nature Biotechnology 18:630-634 (2000), is a sequencing approach that combines non-gel-based signature sequencing with in vitro cloning of millions of templates on separate 5 μm diameter microbeads. First, a microbead library of DNA templates is constructed by in vitro cloning. This is followed by the assembly of a planar array of the template-containing microbeads in a flow cell at a high density (typically greater than 3×10⁶ microbeads/cm²). The free ends of the cloned templates on each microbead are analyzed simultaneously, using a fluorescence-based signature sequencing method that does not require DNA fragment separation. This method has been shown to simultaneously and accurately provide, in a single operation, hundreds of thousands of gene signature sequences from a yeast cDNA library.

[0316] The steps of a representative protocol for profiling gene expression using fixed, paraffin-embedded tissues as the RNA source, including mRNA isolation, purification, primer extension and amplification are given in various published journal articles (for example: Godfrey et al. J. Molec. Diagnostics 2: 84-91 (2000); Specht et al., Am. J. Pathol. 158: 419-29 (2001)). Briefly, a representative process starts with cutting about 10 microgram thick sections of paraffin-embedded tissue samples. The mRNA is then extracted, and protein and DNA are removed. General methods for mRNA extraction are well known in the art and are disclosed in standard textbooks of molecular biology, including Ausubel et al., Current Protocols of Molecular Biology, John Wiley and Sons (1997). Methods for RNA extraction from paraffin embedded tissues are disclosed, for example, in Rupp and Locker, Lab Invest. 56:A67 (1987), and De Andrés et al., BioTechniques 18:42044 (1995). In particular, RNA isolation can be performed using purification kit, buffer set and protease from commercial manufacturers, such as Qiagen, according to the manufacturer's instructions. For example, total RNA from cells in culture can be isolated using Qiagen RNeasy mini-columns. Other commercially available RNA isolation kits include MasterPure™ Complete DNA and RNA Purification Kit (EPICENTRE®, Madison, Wis.), and Paraffin Block RNA Isolation Kit (Ambion, Inc.). Total RNA from tissue samples can be isolated using RNA Stat-60 (Tel-Test). RNA prepared from tissues can be isolated, for example, by cesium chloride density gradient centrifugation. After analysis of the RNA concentration, RNA repair and/or amplification steps may be included, if necessary, and RNA is reverse transcribed using gene specific promoters followed by PCR. Peferably, real time PCR is used, which is compatible both with quantitative competitive PCR, where internal competitor for each target sequence is used for normalization, and with quantitative comparative PCR using a normalization gene contained within the sample, or a housekeeping gene for RT-PCR. For further details see, e.g. “PCR: The Polymerase Chain Reaction”, Mullis et al., eds., 1994; and Held et al., Genome Research 6:986-994 (1996). Finally, the data are analyzed to identify the best treatment option(s) available to the patient on the basis of the characteristic gene expression pattern identified in the sample examined.

[0317] f. Immunohistochemistry

[0318] Immunohistochemistry methods are also suitable for detecting the expression levels of the IBD markers of the present invention. Thus, antibodies or antisera, preferably polyclonal antisera, and most preferably monoclonal antibodies specific for each marker are used to detect expression. The antibodies can be detected by direct labeling of the antibodies themselves, for example, with radioactive labels, fluorescent labels, hapten labels such as, biotin, or an enzyme such as horse radish peroxidase or alkaline phosphatase. Alternatively, unlabeled primary antibody is used in conjunction with a labeled secondary antibody, comprising antisera, polyclonal antisera or a monoclonal antibody specific for the primary antibody. Immunohistochemistry protocols and kits are well known in the art and are commercially available.

[0319] Expression levels can also be determined at the protein level, for example, using various types of immunoassays or proteomics techniques.

[0320] In immunoassays, the target diagnostic protein marker is detected by using an antibody specifically binding to the markes. The antibody typically will be labeled with a detectable moiety. Numerous labels are available which can be generally grouped into the following categories:

[0321] Radioisotopes, such as 35S, 14C, 125I, 3H, and 131I. The antibody can be labeled with the radioisotope using the techniques described in Current Protocols in Immunology, Volumes 1 and 2, Coligen et al. (1991) Ed. Wiley-Interscience, New York, N.Y., Pubs, for example and radioactivity can be measured using scintillation counting.

[0322] Fluorescent labels such as rare earth chelates (europium chelates) or fluorescein and its derivatives, rhodamine and its derivatives, dansyl, Lissamine, phycoerythrin and Texas Red are available. The fluorescent labels can be conjugated to the antibody using the techniques disclosed in Current Protocols in Immunology, supra, for example. Fluorescence can be quantified using a fluorimeter.

[0323] Various enzyme-substrate labels are available and U.S. Pat. No. 4,275,149 provides a review of some of these. The enzyme generally catalyzes a chemical alteration of the chromogenic substrate which can be measured using various techniques. For example, the enzyme may catalyze a color change in a substrate, which can be measured spectrophotometrically. Alternatively, the enzyme may alter the fluorescence or chemiluminescence of the substrate. Techniques for quantifying a change in fluorescence are described above. The chemiluminescent substrate becomes electronically excited by a chemical reaction and may then emit light which can be measured (using a chemiluminometer, for example) or donates energy to a fluorescent acceptor. Examples of enzymatic labels include luciferases (e.g., firefly luciferase and bacterial luciferase; U.S. Pat. No. 4,737,456), luciferin, 2,3-dihydrophthalazinediones, malate dehydrogenase, urease, peroxidase such as horseradish peroxidase (HRPO), alkaline phosphatase, β-galactosidase, glueoamylase, lysozyme, saccharide oxidases (e.g., glucose oxidase, galactose oxidase, and glucose-6-phosphate dehydrogenase), heterocyclic oxidases (such as uricase and xanthine oxidase), lactoperoxidase, microperoxidase, and the like. Techniques for conjugating enzymes to antibodies are described in O'Sullivan et al. (1981) Methods for the Preparation of Enzyme-Antibody Conjugates for use in Enzyme Immunoassay, in Methods in Enzym. (ed J. Langone & H. Van Vunakis), Academic press, New York 73:147-166.

[0324] Examples of enzyme-substrate combinations include, for example: horseradish peroxidase (HRPO) with hydrogen peroxidase as a substrate, wherein the hydrogen peroxidase oxidizes a dye precursor (e,g., orthophenylene diamine (OPD) or 3,3′,5,5′-tetramethyl benzidine hydrochloride (TMB)); alkaline phosphatase (AP) with para-Nitrophenyl phosphate as chromogenic substrate; and β-D-galactosidase (β-D-Gal) with a chromogenic substrate (e.g., p-nitrophenyl-β-D-galactosidase) or fluorogenie substrate 4-methylumbelliferyl-β-D-galactosidase.

[0325] Numerous other enzyme-substrate combinations are available to those skilled in the art. For a general review of these, see U.S. Pat. Nos. 4,275,149 and 4,318,980.

[0326] Sometimes, the label is indirectly conjugated with the antibody. The skilled artisan will be aware of various techniques for achieving this. For example, the antibody can be conjugated with biotin and any of the three broad categories of labels mentioned above can be conjugated with avidin, or vice versa. Biotin binds selectively to avidin and thus, the label can be conjugated with the antibody in this indirect manner. Alternatively, to achieve indirect conjugation of the label with the antibody, the antibody is conjugated with a small hapten (e.g., digoxin) and one of the different types of labels mentioned above is conjugated with an anti-hapten antibody (e.g., anti-digoxin antibody). Thus, indirect conjugation of the label with the antibody can be achieved.

[0327] In other versions of immunoassay techniques, the antibody need not be labeled, and the presence thereof can be detected using a labeled antibody which binds to the antibody.

[0328] Thus, the diagnostic immunoassays herein may be in any assay format, including, for example, competitive binding assays, direct and indirect sandwich assays, and immunoprecipitation assays. Zola, Monoclonal Antibodies: A Manual of Techniques, pp. 147-158 (CRC Press, Inc. 1987).

[0329] Competitive binding assays rely on the ability of a labeled standard to compete with the test sample analyze for binding with a limited amount of antibody. The amount of antigen in the test sample is inversely proportional to the amount of standard that becomes bound to the antibodies. To facilitate determining the amount of standard that becomes bound, the antibodies generally are insolubilized before or after the competition, so that the standard and analyze that are bound to the antibodies may conveniently be separated from the standard and analyze which remain unbound.

[0330] Sandwich assays involve the use of two antibodies, each capable of binding to a different immunogenic portion, or epitope, of the protein to be detected. In a sandwich assay, the test sample analyze is bound by a first antibody which is immobilized on a solid support, and thereafter a second antibody binds to the analyze, thus forming an insoluble three-part complex. See, e.g., U.S. Pat. No. 4,376,110. The second antibody may itself be labeled with a detectable moiety (direct sandwich assays) or may be measured using an anti-immunoglobulin antibody that is labeled with a detectable moiety (indirect sandwich assay), for example, one type of sandwich assay is an ELISA assay, in which case the detectable moiety is an enzyme.

[0331] g. Proteomics

[0332] The term “proteome” is defined as the totality of the proteins present in a sample (e.g. tissue, organism, or cell culture) at a certain point of time. Proteomics includes, among other things, study of the global changes of protein expression in a sample (also referred to as “expression proteomics”). Proteomics typically includes the following steps: (1) separation of individual proteins in a sample by 2-D gel electrophoresis (2-D PAGE); (2) identification of the individual proteins recovered from the gel, e.g. my mass spectrometry or N-terminal sequencing, and (3) analysis of the data using bioinformatics. Proteomics methods are valuable supplements to other methods of gene expression profiling, and can be used, alone or in combination with other methods, to detect the products of the markers of the present invention.

[0333] h. 5′-Multiplexed Gene Specific Priming of Reverse Transcription

[0334] RT-PCR requires reverse transcription of the test RNA population as a first step. The most commonly used primer for reverse transcription is oligo-dT, which works well when RNA is intact. However, this primer will not be effective when RNA is highly fragmented.

[0335] The present invention includes the use of gene specific primers, which arc roughly 20 bases in length with a Tm optimum between about 58° C. and 60° C. These primers will also serve as the reverse primers that drive PCR DNA amplification.

[0336] An alternative approach is based on the use of random hexamers as primers for cDNA synthesis. However, we have experimentally demonstrated that the method of using a multiplicity of gene-specific primers is superior over the known approach using random hexamers.

[0337] i. Promoter Methylation Analysis

[0338] A number of methods for quantization of RNA transcripts (gene expression analysis) or their protein translation products are discussed herein. The expression level of genes may also be inferred from information regarding chromatin structure, such as for example the methylation status of gene promoters and other regulatory elements and the acetylation status of histones.

[0339] In particular, the methylation status of a promoter influences the level of expression of the gene regulated by that promoter. Aberrant methylation of particular gene promoters has been implicated in expression regulation, such as for example silencing of tumor suppressor genes. Thus, examination of the methylation status of a gene's promoter can be utilized as a surrogate for direct quantization of RNA levels.

[0340] Several approaches for measuring the methylation status of particular DNA elements have been devised, including methylation-specific PCR (Herman J. G. et al. (1996) Methylation-specific PCR: a novel PCR assay for methylation status of CpG islands. Proc. Natl Acad. Sci. USA. 93, 9821 9826.) and bisulfite DNA sequencing (Frommer M. et al. (1992) A genomic sequencing protocol that yields a positive display of 5-methyleytosine residues in individual DNA strands. Proc. Natl Acad. Sci. USA. 89, 1827-1831.). More recently, microarray-based technologies have been used to characterize promoter methylation status (Chen C. M. (2003) Methylation target array for rapid analysis of CpG island hypermethylation in multiple tissue genomes. Am. J. Pathol. 163, 37 45.).

[0341] j. Coexpression of Genes

[0342] A further aspect of the invention is the identification of gene expression clusters. Gene expression clusters can be identified by analysis of expression data using statistical analyses known in the art, including pairwise analysis of correlation based on Pearson correlation coefficients (Pearson K. and Lee A. (1902) Biometrika 2, 357).

[0343] In one embodiment, an expression cluster identified herein includes genes upregulated in the left colon (FIG. 1).

[0344] In another embodiment, an expression cluster identified herein includes genes upregulated in the right colon (FIG. 1).

[0345] In one other embodiment, an expression cluster identified herein includes genes upregulated in the terminal ileum (FIG. 1).

[0346] In other embodiments, the expression cluster identified herein includes genes in the IBD2 locus (Table 7); or in the IBD5 locus (Table 8).

[0347] In some embodiments, the expression cluster identified herein includes genes classified under an immune response.

[0348] In other embodiments, the expression cluster identified herein includes genes classified under a response to wounding.

[0349] k. Design of Intron-Based PCR Primers and Probes

[0350] According to one aspect of the present invention, PCR primers and probes are designed based upon intron sequences present in the gene to be amplified. Accordingly, the first step in the primer/probe design is the delineation of intron sequences within the genes. This can be done by publicly available software, such as the DNA BLAT software developed by Kent, W. J., Genome Res. 12(4):656-64 (2002), or by the BLAST software including its variations. Subsequent steps follow well established methods of PCR primer and probe design.

[0351] In order to avoid non-specific signals, it is important to mask repetitive sequences within the introns when designing the primers and probes. This can be easily accomplished by using the Repeat Masker program available on-line through the Baylor College of Medicine, which screens DNA sequences against a library of repetitive elements and returns a query sequence in which the repetitive elements are masked. The masked intron sequences can then be used to design primer and probe sequences using any commercially or otherwise publicly available primer/probe design packages, such as Primer Express (Applied Biosystems); MGB assay-by design (Applied Biosystems); Primer3 (Steve Rozen and Helen J. Skaletsky (2000) Primer3 on the WWW for general users and for biologist programmers. In: Krawetz S, Misener S (eds) Bioinformatics Methods and Protocols: Methods in Molecular Biology. Humana Press, Totowa, N.J., pp 365-386).

[0352] The most important factors considered in PCR primer design include primer length, melting temperature (Tm), and G/C content, specificity, complementary primer sequences, and 3′-end sequence. In general, optimal PCR primers are generally 17-30 bases in length, and contain about 20-80%, such as, for example, about 50-60% G+C bases. Tm's between 50 and 80° C., e.g. about 50 to 70° C. are typically preferred.

[0353] For further guidelines for PCR primer and probe design see, e.g. Dieffenbach, C. W. et al., “General Concepts for PCR Primer Design” in: PCR Primer, A Laboratory Manual, Cold Spring Harbor Laboratory Press, New York, 1995, pp. 133-155; Innis and Gelfand, “Optimization of PCRs” in: PCR Protocols, A Guide to Methods and Applications. CRC Press, London, 1994, pp. 5-11; and Plasterer, T. N. Primerselect: Primer and probe design. Methods Mol. Biol. 70:520-527 (1997), the entire disclosures of which are hereby expressly incorporated by reference.

[0354] l. IBD Gene Set, Assayed Gene Subsequences, and Clinical Application of Gene Expression Data

[0355] An important aspect of the present invention is to use the measured expression of certain genes by colonic issue to provide diagnostic information. For this purpose it is necessary to correct for (normalize away) both differences in the amount of RNA assayed and variability in the quality of the RNA used. Therefore, the assay typically measures and incorporates the expression of certain normalizing genes, including well known housekeeping genes, such as GAPDH and Cyp1. Alternatively, normalization can be based on the mean or median signal (Ct) of all of the assayed genes or a large subset thereof (global normalization approach). On a gene-by-gene basis, measured normalized amount of a patient colonic tissue mRNA is compared to the amount found in an appropriate tissue reference set. The number (N) of tissues in this reference set should be sufficiently high lo ensure that different reference sets (as a whole) behave essentially the same way. If this condition is met, the identity of the individual colonic tissues present in a particular set will have no significant impact on the relative amounts of the genes assayed. Usually, the tissue reference set consists of at least about 30, preferably at least about 40 different IBD tissue specimens. Unless noted otherwise, normalized expression levels for each mRNA/tested tissue/patient will be expressed as a percentage of the expression level measured in the reference set. More specifically, the reference set of a sufficiently high number (e.g. 40) of IBD samples yields a distribution of normalized levels of each mRNA species. The level measured in a particular sample to be analyzed falls at some percentile within this range, which can be determined by methods well known in the art. Below, unless noted otherwise, reference to expression levels of a gene assume normalized expression relative to the reference set although this is not always explicitly stated.

[0356] m. Production of Antibodies

[0357] The present invention further provides anti-IBD marker antibodies. Exemplary antibodies include polyclonal, monoclonal, humanized, bispecific, and heteroconjugate antibodies. As discussed herein, the antibodies may be used in the diagnostic methods for IBD, and in some cases in methods of treatment of IBD.

[0358] (1) Polyclonal Antibodies

[0359] Polyclonal antibodies are preferably raised in animals by multiple subcutaneous (sc) or intraperitoneal (ip) injections of the relevant antigen and an adjuvant. It may be useful to conjugate the relevant antigen to a protein that is immunogenic in the species to be immunized, e.g., keyhole limpet hemocyanin, serum albumin, bovine thyroglobulin, or soybean trypsin inhibitor using a bifunctional or derivatizing agent, for example, maleimidobenzoyl sulfosuccinimide ester (conjugation through cysteine residues), N-hydroxysuccinimide (through lysine residues), glutaraldehyde, succinic anhydride, SOCl2, or R1N═C═NR, where R and R1 are different alkyl groups.

[0360] Animals are immunized against the antigen, immunogenic conjugates, or derivatives by combining, e.g., 100 μg or 5 μg of the protein or conjugate (for rabbits or mice, respectively) with 3 volumes of Freund's complete adjuvant and injecting the solution intradermally at multiple sites. One month later the animals are boosted with ⅕ to 1/10 the original amount of peptide or conjugate in Freund's complete adjuvant by subcutaneous injection at multiple sites. Seven to 14 days later the animals are bled and the serum is assayed for antibody titer. Animals are boosted until the titer plateaus. Preferably, the animal is boosted with the conjugate of the same antigen, but conjugated to a different protein and/or through a different cross-linking reagent. Conjugates also can be made in recombinant cell culture as protein fusions. Also, aggregating agents such as alum are suitably used to enhance the immune response.

[0361] (2) Monoclonal Antibodies

[0362] Various methods for making monoclonal antibodies herein are available in the art. For example, the monoclonal antibodies may be made using the hybridoma method first described by Kohler et al., Nature, 256:495 (1975), by recombinant DNA methods (U.S. Pat. No. 4,816,567).

[0363] In the hybridoma method, a mouse or other appropriate host animal, such as a hamster, is immunized as hereinabove described to elicit lymphocytes that produce or are capable of producing antibodies that will specifically bind to the protein used for immunization. Alternatively, lymphocytes may be immunized in vitro. Lymphocytes then are fused with myeloma cells using a suitable fusing agent, such as polyethylene glycol, to form a hybridoma cell (Coding, Monoclonal Antibodies: Principles and Practice, pp. 59-103 (Academic Press, 1986)).

[0364] The hybridoma cells thus prepared are seeded and grown in a suitable culture medium that preferably contains one or more substances that inhibit the growth or survival of the unfused, parental myeloma cells. For example, if the parental myeloma cells lack the enzyme hypoxanthine guanine phosphoribosyl transferase (HGPRT or HPRT), the culture medium for the hybridomas typically will include hypoxanthine, aminopterin, and thymidine (HAT medium), which substances prevent the growth of HGPRT-deficient cells.

[0365] Preferred myeloma cells are those that fuse efficiently, support stable high-level production of antibody by the selected antibody-producing cells, and are sensitive to a medium such as HAT medium. Among these, preferred myeloma cell lines are murine myeloma lines, such as those derived from MOPC-21 and MPC-11 mouse tumors available from the Salk Institute Cell Distribution Center, San Diego, Calif. USA, and SP-2 or X63-Ag8-653 cells available from the American Type Culture Collection, Rockville, Md. USA. Human myeloma and mouse-human heteromyeloma cell lines also have been described for the production of human monoclonal antibodies (Kozbor, J. Immunol., 133:3001 (1984); and Brodeur et al., Monoclonal Antibody Production Techniques and Applications, pp. 51-63 (Marcel Dekker, Inc., New York, 1987)).

[0366] Culture medium in which hybridoma cells are growing is assayed for production of monoclonal antibodies directed against the antigen. Preferably, the binding specificity of monoclonal antibodies produced by hybridoma cells is determined by immunoprecipitation or by an in vitro binding assay, such as radioimmunoassay (RIA) or enzyme-linked immunoabsorbent assay (ELISA).

[0367] The binding affinity of the monoclonal antibody can, for example, be determined by the Scatchard analysis of Munson et al., Anal. Biochem., 107:220 (1980).

[0368] After hybridoma cells are identified that produce antibodies of the desired specificity, affinity, and/or activity, the clones may be subcloned by limiting dilution procedures and grown by standard methods (Coding, Monoclonal Antibodies: Principles and Practice, pp. 59-103 (Academic Press, 1986)). Suitable culture media for this purpose include, for example, D-MEM or RPMI-1640 medium. In addition, the hybridoma cells may be grown in vivo as ascites tumors in an animal.

[0369] The monoclonal antibodies secreted by the subclones are suitably separated from the culture medium, ascites fluid, or serum by conventional antibody purification procedures such as, for example, protein A-Sepharose, hydroxylapatite chromatography, gel electrophoresis, dialysis, or affinity chromatography.

[0370] DNA encoding the monoclonal antibodies is readily isolated and sequenced using conventional procedures (e.g., by using oligonucleotide probes that are capable of binding specifically to genes encoding the heavy and light chains of murine antibodies). The hybridoma cells serve as a preferred source of such DNA. Once isolated, the DNA may be placed into expression vectors, which are then transfected into host cells such as E. coli cells, simian COS cells, Chinese Hamster Ovary (CHO) cells, or myeloma cells that do not otherwise produce antibody protein, to obtain the synthesis of monoclonal antibodies in the recombinant host cells. Review articles on recombinant expression in bacteria of DNA encoding the antibody include Skerra et al., Curr. Opinion in Immunol., 5:256-262 (1993) and Plückthun, Immunol. Revs., 130:151-188 (1992).

[0371] In a further embodiment, monoclonal antibodies or antibody fragments can be isolated from antibody phage libraries generated using the techniques described in McCafferty et al., Nature, 348:552-554 (1990). Clackson et al., Nature, 352:624-628 (1991) and Marks et al., J. Mol. Biol., 222:581-597 (1991) describe the isolation of murine and human antibodies, respectively, using phage libraries. Subsequent publications describe the production of high affinity (nM range) human antibodies by chain shuffling (Marks et al., Bio/Technology, 10:779-783 (1992)), as well as combinatorial infection and in vivo recombination as a strategy for constructing very large phage libraries (Waterhouse et al., Nuc. Acids. Res., 21:2265-2266 (1993)). Thus, these techniques are viable alternatives to traditional monoclonal antibody hybridoma techniques for isolation of monoclonal antibodies.

[0372] The DNA also may be modified, for example, by substituting the coding sequence for human heavy chain and light chain constant domains in place of the homologous murine sequences (U.S. Pat. No. 4,816,567; and Morrison, et al., Proc. Natl Acad. Sci. USA, 81:6851 (1984)), or by covalently joining to the immunoglobulin coding sequence all or part of the coding sequence for a non-immunoglobulin polypeptide.

[0373] Typically such non-immunoglobulin polypeptides are substituted for the constant domains of an antibody, or they are substituted for the variable domains of one antigen-combining site of an antibody to create a chimeric bivalent antibody comprising one antigen-combining site having specificity for an antigen and another antigen-combining site having specificity for a different antigen.

[0374] (3) Humanized Antibodies

[0375] Methods for humanizing non-human antibodies have been described in the art. Preferably, a humanized antibody has one or more amino acid residues introduced into it from a source which is non-human. These non-human amino acid residues are often referred to as “import” residues, which are typically taken from an “import” variable domain. Humanization can be essentially performed following the method of Winter and co-workers (Jones et al., Nature, 321:522-525 (1986); Riechmann et al., Nature, 332:323-327 (1988); Verhoeyen et al., Science, 239:1534-1536 (1988)), by substituting hypervariable region sequences for the corresponding sequences of a human antibody. Accordingly, such “humanized” antibodies are chimeric antibodies (U.S. Pat. No. 4,816,567) wherein substantially less than an intact human variable domain has been substituted by the corresponding sequence from a non-human species. In practice, humanized antibodies are typically human antibodies in which some hypervariable region residues and possibly some FR residues are substituted by residues from analogous sites in rodent antibodies. An example of a humanized antibody used to treat IBD is infliximab (Remicade®), an engineered murine-human chimeric monoclonal antibody. The antibody binds the cytokine TNF-alpha and prevents it from binding its receptors to trigger and sustain an inflammatory response. Infliximab is used to treat both CD and UC.

[0376] The choice of human variable domains, both light and heavy, to be used in making the humanized antibodies is very important to reduce antigenicity. According to the so-called “best-fit” method, the sequence of the variable domain of a rodent antibody is screened against the entire library of known human variable-domain sequences. The human sequence which is closest to that of the rodent is then accepted as the human framework region (FR) for the humanized antibody (Sims et al., J. Immunol., 151:2296 (1993); Chothia et al., J. Mol. Biol., 196:901 (1987)). Another method uses a particular framework region derived from the consensus sequence of all human antibodies of a particular subgroup of light or heavy chains. The same framework may be used for several different humanized antibodies (Carter et al., Proc. Natl. Acad. Sci. USA, 89:4285 (1992); Presta et al., J. Immunol., 151:2623 (1993)).

[0377] It is further important that antibodies be humanized with retention of high affinity for the antigen and other favorable biological properties. To achieve this goal, according lo a preferred method, humanized antibodies are prepared by a process of analysis of the parental sequences and various conceptual humanized products using three-dimensional models of the parental and humanized sequences. Three-dimensional immunoglobulin models are commonly available and are familiar to those skilled in the art. Computer programs are available which illustrate and display probable three-dimensional conformational structures of selected candidate immunoglobulin sequences. Inspection of these displays permits analysis of the likely role of the residues in the functioning of the candidate immunoglobulin sequence, i.e., the analysis of residues that influence the ability of the candidate immunoglobulin to bind its antigen. In this way, FR residues can be selected and combined from the recipient and import sequences so that the desired antibody characteristic, such as increased affinity for the target antigen(s), is achieved. In general, the hypervariable region residues are directly and most substantially involved in influencing antigen binding.

[0378] Various forms of the humanized antibody are contemplated. For example, the humanized antibody may be an antibody fragment, such as a Fab, which is optionally conjugated with one or more cytotoxic agent(s) in order lo generate an immunoconjugate. Alternatively, the humanized antibody may be an intact antibody, such as an intact IgG1 antibody.

[0379] (4) Human Antibodies

[0380] As an alternative to humanization, human antibodies can be generated. For example, it is now possible to produce transgenic animals (e.g., mice) that are capable, upon immunization, of producing a full repertoire of human antibodies in the absence of endogenous immunoglobulin production. For example, it has been described that the homozygous deletion of the antibody heavy-chain joining region (JH) gene in chimeric and germ-line mutant mice results in complete inhibition of endogenous antibody production. Transfer of the human germ-line immunoglobulin gene array in such germ-line mutant mice will result in the production of human antibodies upon antigen challenge. See, e.g., Jakobovits et al., Proc. Natl. Acad. Sci. USA, 90:2551 (1993); Jakobovits et al., Nature, 362:255-258 (1993); Bruggermann et al., Year in Immuno., 7:33 (1993); and U.S. Pat. Nos. 5,591,669, 5,589,369 and 5,545,807. Alternatively, phage display technology (McCafferty et al., Nature 348:552-553 (1990)) can be used to produce human antibodies and antibody fragments in vitro, from immunoglobulin variable (V) domain gene repertoires from unimmunized donors. According to this technique, antibody V domain genes are cloned in-frame into either a major or minor coat protein gene of a filamentous bacteriophage, such as M13 or fd, and displayed as functional antibody fragments on the surface of the phage particle. Because the filamentous particle contains a single-stranded DNA copy of the phage genome, selections based on the functional properties of the antibody also result in selection of the gene encoding the antibody exhibiting those properties. Thus, the phage mimics some of the properties of the B-cell. Phage display can be performed in a variety of formats; for their review sec, e.g., Johnson, Kevin S. and Chiswell, David J., Current Opinion in Structural Biology 3:564-571 (1993). Several sources of V-gene segments can be used for phage display. Clackson et al., Nature, 352:624-628 (1991) isolated a diverse array of anti-oxazolone antibodies from a small random combinatorial library of V genes derived from the spleens of immunized mice. A repertoire of V genes from unimmunized human donors can be constructed and antibodies to a diverse array of antigens (including self-antigens) can be isolated essentially following the techniques described by Marks et al., J. Mol. Biol. 222:581-597 (1991), or Griffith et al., EMBO J. 12:725-734 (1993). See, also, U.S. Pat. Nos. 5,565,332 and 5,573,905.

[0381] As discussed above, human antibodies may also be generated by in vitro activated B cells (see U.S. Pat. Nos. 5,567,610 and 5,229,275).

[0382] (5) Antibody Fragments

[0383] Various techniques have been developed for the production of antibody fragments comprising one or more antigen binding regions. Traditionally, these fragments were derived via proteolytic digestion of intact antibodies (see, e.g., Morimoto et al., Journal of Biochemical and Biophysical Methods 24:107-117 (1992); and Brennan et al., Science, 229:81 (1985)). However, these fragments can now be produced directly by recombinant host cells. For example, the antibody fragments can be isolated from the antibody phage libraries discussed above. Alternatively, Fab′-SH fragments can be directly recovered from E. coli and chemically coupled to form F(ab′)2 fragments (Carter et al., Bio/Technology 10:163-167 (1992)). According to another approach, F(ab′)2 fragments can be isolated directly from recombinant host cell culture. Other techniques for the production of antibody fragments will be apparent to the skilled practitioner. In other embodiments, the antibody of choice is a single chain Fv fragment (scFv). See WO 93/16185; U.S. Pat. No. 5,571,894; and U.S. Pat. No. 5,587,458. The antibody fragment may also be a Alinear antibody@, e.g., as described in U.S. Pat. No. 5,641,870 for example. Such linear antibody fragments may be monospecific or bispecific.

[0384] (6) Bispecific Antibodies

[0385] Bispecific antibodies are antibodies that have binding specificities for at least two different epitopes. Exemplary bispecific antibodies may bind to two different epitopes of an IBD marker protein. Bispecific antibodies may also be used to localize agents to cells which express an IBD marker protein.

[0386] These antibodies possess an IBD marker-binding arm and an arm which binds an agent (e.g. an aminosalicylate). Bispecific antibodies can be prepared as full length antibodies or antibody fragments (e.g. F(ab′)2 bispecific antibodies).

[0387] Methods for making bispecific antibodies are known in the art. Traditional production of full length bispecific antibodies is based on the coexpression of two immunoglobulin heavy chain-light chain pairs, where the two chains have different specificities (Millstein et al., Nature, 305:537-539 (1983)). Because of the random assortment of immunoglobulin heavy and light chains, these hybridomas (quadromas) produce a potential mixture of 10 different antibody molecules, of which only one has the correct bispecific structure. Purification of the correct molecule, which is usually done by affinity chromatography steps, is rather cumbersome, and the product yields are low. Similar procedures are disclosed in WO 93/08829, and in Traunecker et al., EMBO J., 10:3655-3659 (1991).

[0388] According to a different approach, antibody variable domains with the desired binding specificities (antibody-antigen combining sites) are fused to immunoglobulin constant domain sequences. The fusion preferably is with an immunoglobulin heavy chain constant domain, comprising at least part of the hinge, CH2, and CH3 regions. It is preferred to have the first heavy-chain constant region (CH1) containing the site necessary for light chain binding, present in at least one of the fusions. DNAs encoding the immunoglobulin heavy chain fusions and, if desired, the immunoglobulin light chain, are inserted into separate expression vectors, and are co-transfected into a suitable host organism. This provides for great flexibility in adjusting the mutual proportions of the three polypeptide fragments in embodiments when unequal ratios of the three polypeptide chains used in the construction provide the optimum yields. It is, however, possible to insert the coding sequences for two or all three polypeptide chains in one expression vector when the expression of at least two polypeptide chains in equal ratios results in high yields or when the ratios are of no particular significance.

[0389] In a preferred embodiment of this approach, the bispecific antibodies are composed of a hybrid immunoglobulin heavy chain with a first binding specificity in one arm, and a hybrid immunoglobulin heavy chain-light chain pair (providing a second binding specificity) in the other arm. It was found that this asymmetric structure facilitates the separation of the desired bispecific compound from unwanted immunoglobulin chain combinations, as the presence of an immunoglobulin light chain in only one half of the bispecific molecule provides for a facile way of separation. This approach is disclosed in WO 94/04690. For further details of generating bispecific antibodies sec, for example, Suresh et al., Methods in Enzymology, 121:210 (1986).

[0390] According to another approach described in U.S. Pat. No. 5,731,168, the interface between a pair of antibody molecules can be engineered to maximize the percentage of heterodimers which are recovered from recombinant cell culture. The preferred interface comprises at least a part of the C_{H}3 domain of an antibody constant domain. In this method, one or more small amino acid side chains from the interface of the first antibody molecule are replaced with larger side chains (e.g. tyrosine or tryptophan). Compensatory “cavities” of identical or similar size to the large side chain(s) are created on the interface of the second antibody molecule by replacing large amino acid side chains with smaller ones (e.g. alanine or threonine). This provides a mechanism for increasing the yield of the heterodimer over other unwanted end-products such as homodimers.

[0391] Bispecific antibodies include cross-linked or “heteroconjugate” antibodies. For example, one of the antibodies in the heteroconjugate can be coupled to avidin, the other to biotin. Such antibodies have, for example, been proposed to target immune system cells to unwanted cells (U.S. Pat. No. 4,676,980), and for treatment of HIV infection (WO 91/00360, WO 92/200373, and HP 03089). Heteroconjugate antibodies may be made using any convenient cross-linking methods. Suitable cross-linking agents are well known in the art, and are disclosed in U.S. Pat. No. 4,676,980, along with a number of cross-linking techniques.

[0392] Techniques for generating bispecific antibodies from antibody fragments have also been described in the literature. For example, bispecific antibodies can be prepared using chemical linkage. Brennan et al., Science, 229: 81 (1985) describe a procedure wherein intact antibodies are proteolytically cleaved to generate F(ab′)₂ fragments. These fragments are reduced in the presence of the dithiol complexing agent sodium arsenite to stabilize vicinal dithiols and prevent intermolecular disulfide formation. The Fab′ fragments generated are then converted to thionitrobenzoate (TNB) derivatives. One of the Fab′-TNB derivatives is then reconverted to the Fab′-thiol by reduction with mercaptoethylamine and is mixed with an equimolar amount of the other Fab′-TNB derivative to form the bispecific antibody. The bispecific antibodies produced can be used as agents for the selective immobilization of enzymes.

[0393] Various techniques for making and isolating bispecific antibody fragments directly from recombinant cell culture have also been described. For example, bispecific antibodies have been produced using leucine zippers. Kostelny et al., J. Immunol., 148(5): 1547-1553 (1992). The leucine zipper peptides from the Fos and Jun proteins were linked to the Fab=40 =0 portions of two different antibodies by gene fusion. The antibody homodimers were reduced at the hinge region to form monomers and then re-oxidized to form the antibody heterodimers. This method can also be utilized for the production of antibody homodimers. The “diabody” technology described by Hollinger et al., Proc. Natl. Acad. Sci. USA, 90:6444-6448 (1993) has provided an alternative mechanism for making bispecific antibody fragments. The fragments comprise a heavy-chain variable domain (V_{H}) connected to a light-chain variable domain (V_{L}) by a linker which is too short to allow pairing between the two domains on the same chain. Accordingly, the V_{H} and V_{L} domains of one fragment are forced to pair with the complementary V_{L} and V_{H} domains of another fragment, thereby forming two antigen-binding sites. Another strategy for making bispecific antibody fragments by the use of single-chain Fv (sFv) dimers has also been reported. See Gruber et al., J. Immunol., 152:5368 (1994).

[0394] Antibodies with more than two valencies are contemplated. For example, trispecific antibodies can be prepared. Tutt et al. J. Immunol. 147: 60 (1991).

[0395] (7) Other Amino Acid Sequence Modifications

[0396] Amino acid sequence modification(s) of the antibodies described herein are contemplated. For example, it may be desirable to improve the binding affinity and/or other biological properties of the antibody. Amino acid sequence variants of the antibody are prepared by introducing appropriate nucleotide changes into the antibody nucleic acid, or by peptide synthesis. Such modifications include, for example, deletions from, and/or insertions into and/or substitutions of, residues within the amino acid sequences of the antibody. Any combination of deletion, insertion, and substitution is made lo arrive at the final construct, provided that the final construct possesses the desired characteristics. The amino acid changes also may alter post-translational processes of the antibody, such as changing the number or position of glycosylation sites.

[0397] A useful method for identification of certain residues or regions of the antibody that are preferred locations for mutagenesis is called “alanine scanning mutagenesis” as described by Cunningham and Wells Science, 244:1081-1085 (1989). Here, a residue or group of target residues are identified (e.g., charged residues such as arg, asp, his, lys, and glu) and replaced by a neutral or negatively charged amino acid (most preferably alanine or polyalanine) to affect the interaction of the amino acids with antigen. Those amino acid locations demonstrating functional sensitivity to the substitutions then are refined by introducing further or other variants at, or for, the sites of substitution. Thus, while the site for introducing an amino acid sequence variation is predetermined, the nature of the mutation per se need not be predetermined. For example, to analyze the performance of a mutation at a given site, ala scanning or random mutagenesis is conducted at the target codon or region and the expressed antibody variants are screened for the desired activity.

[0398] Amino acid sequence insertions include amino- and/or carboxyl-terminal fusions ranging in length from one residue to polypeptides containing a hundred or more residues, as well as intrasequence insertions of single or multiple amino acid residues. Examples of terminal insertions include antibody with an N-terminal methionyl residue or the antibody fused to a cytotoxic polypeptide. Other insertional variants of the antibody molecule include the fusion to the N- or C-terminus of the antibody to an enzyme (e.g. for ADEPT) or a polypeptide which increases the serum half-life of the antibody.

[0399] Another type of variant is an amino acid substitution variant. These variants have at least one amino acid residue in the antibody molecule replaced by a different residue. The sites of greatest interest for substitutional mutagenesis include the hypervariable regions, but FR alterations are also contemplated. Conservative substitutions are shown in Table 1 under the heading of “preferred substitutions”. If such substitutions result in a change in biological activity, then more substantial changes, denominated “exemplary substitutions” in the following table, or as further described below in reference to amino acid classes, may be introduced and the products screened.

| Original | | Preferred |
|---|---|---|
| Residue | Exemplary Substitutions | Substitutions |
| Ala (A) | val; leu; ile | val |
| Arg (R) | lys; gln; asn | lys |
| Asn (N) | gln; his; lys; arg | gln |
| Asp (D) | glu | glu |
| Cys (C) | ser | ser |
| Gln (Q) | asn | asn |
| Glu (E) | asp | asp |
| Gly (G) | pro; ala | ala |
| His (H) | asn; gln; lys; arg | arg |
| Ile (I) | leu; val; met; ala; phe; norleucine | leu |
| Leu (L) | norleucine; ile; val; met; ala; phe | ile |
| Lys (K) | arg; gln; asn | arg |
| Met (M) | leu; phe; ile | leu |
| Phe (F) | leu; val; ile; ala; tyr | leu |
| Pro (P) | ala | ala |
| Ser (S) | thr | thr |
| Thr (T) | ser | ser |
| Trp (W) | tyr; phe | tyr |
| Tyr (Y) | trp; phe; thr; ser | phe |
| Val (V) | ile; leu; met; phe; ala; norleucine | leu |

[0400] Substantial modifications in the biological properties of the antibody are accomplished by selecting substitutions that differ significantly in their effect on maintaining (a) the structure of the polypeptide backbone in the area of the substitution, for example, as a sheet or helical conformation, (b) the charge or hydrophobicity of the molecule at the target site, or (c) the bulk of the side chain. Amino acids may be grouped according to similarities in the properties of their side chains (in A. L. Lehninger, in Biochemistry, second ed., pp. 73-75, Worth Publishers, New York (1975)): non-polar: Ala (A), Val (V), Leu (L), Ile (I), Pro (P), Phe (F), Trp (W), Met (M); uncharged polar: Gly (G), Ser (S), Thr (T), Cys (C), Tyr (Y), Asn (N), Gln (Q); acidic: Asp (D), Glu (10; and basic: Lys (K), Arg (R), His(H).

[0401] Alternatively, naturally occurring residues may be divided into groups based on common side-chain properties: hydrophobic: Norleucine, Met, Ala, Val, Leu, Ile; neutral hydrophilic: Cys, Ser, Thr, Asn, Gln; acidic: Asp, Glu; basic: His, Lys, Arg; residues that influence chain orientation: Gly, Pro; and aromatic: Trp, Tyr, Phe.

[0402] Non-conservative substitutions will entail exchanging a member of one of these classes for another class.

[0403] Any cysteine residue not involved in maintaining the proper conformation of the antibody also may be substituted, generally with serine, to improve the oxidative stability of the molecule and prevent aberrant crosslinking. Conversely, cysteine bond(s) may be added to the antibody to improve its stability (particularly where the antibody is an antibody fragment such as an Fv fragment).

[0404] A particularly preferred type of substitutional variant involves substituting one or more hypervariable region residues of a parent antibody (e.g. a humanized or human antibody). Generally, the resulting variant(s) selected for further development will have improved biological properties relative to the parent antibody from which they are generated. A convenient way for generating such substitutional variants involves affinity maturation using phage display. Briefly, several hypervariable region sites (e.g. 6-7 sites) are mutated to generate all possible amino substitutions at each site. The antibody variants thus generated are displayed in a monovalent fashion from filamentous phage particles as fusions to the gene III product of M13 packaged within each particle. The phage-displayed variants are then screened for their biological activity (e.g. binding affinity) as herein disclosed. In order to identify candidate hypervariable region sites for modification, alanine scanning mutagenesis can be performed to identify hypervariable region residues contributing significantly to antigen binding. Alternatively, or additionally, it may be beneficial to analyze a crystal structure of the antigen-antibody complex to identify contact points between the antibody and an IBD marker protein. Such contact residues and neighboring residues are candidates for substitution according to the techniques elaborated herein. Once such variants are generated, the panel of variants is subjected to screening as described herein and antibodies with superior properties in one or more relevant assays may be selected for further development.

[0405] Engineered antibodies with three or more (preferably four) functional antigen binding sites are also contemplated (U.S. Published Patent Application No, US2002/0004587 A1, Miller et al.).

[0406] Nucleic acid molecules encoding amino acid sequence variants of the antibody are prepared by a variety of methods known in the art. These methods include, but are not limited to, isolation from a natural source (in the case of naturally occurring amino acid sequence variants) or preparation by oligonucleotide-mediated (or site-directed) mutagenesis, PCR mutagenesis, and cassette mutagenesis of an earlier prepared variant or a non-variant version of the antibody.

### B.3 Kits of the Invention

[0407] The materials for use in the methods of the present invention are suited for preparation of kits produced in accordance with well known procedures. The invention thus provides kits comprising agents, which may include gene-specific or gene-selective probes and/or primers, for quantitating the expression of the disclosed genes for IBD. Such kits may optionally contain reagents for the extraction of RNA from samples, in particular fixed paraffin-embedded tissue samples and/or reagents for RNA amplification. In addition, the kits may optionally comprise the reagent(s) with an identifying description or label or instructions relating to their use in the methods of the present invention. The kits may comprise containers (including microtiter plates suitable for use in an automated implementation of the method), each with one or more of the various reagents (typically in concentrated form) utilized in the methods, including, for example, pre-fabricated microarrays, buffers, the appropriate nucleotide triphosphates (e.g., dATP, dCTP, dGTP and dTTP; or rATP, rCTP, rGTP and UTP), reverse transcriptase, DNA polymerase, RNA polymerase, and one or more probes and primers of the present invention (e.g., appropriate length poly(T) or random primers linked to a promoter reactive with the RNA polymerase).

### B.4 Reports of the Invention

[0408] The methods of this invention, when practiced for commercial diagnostic purposes generally produce a report or summary of the normalized expression levels of one or more of the selected genes. The methods of this invention will produce a report comprising a prediction of the clinical outcome of a subject diagnosed with an IBD before and after any surgical procedure to treat the IBD. The methods and reports of this invention can further include storing the report in a database. Alternatively, the method can further create a record in a database for the subject and populate the record with data. In one embodiment the report is a paper report, in another embodiment the report is an auditory report, in another embodiment the report is an electronic record. It is contemplated that the report is provided to a physician and/or the patient. The receiving of the report can further include establishing a network connection to a server computer that includes the data and report and requesting the data and report from the server computer.

[0409] The methods provided by the present invention may also be automated in whole or in part.

[0410] All aspects of the present invention may also be practiced such that a limited number of additional genes that are co-expressed with the disclosed genes, for example as evidenced by high Pearson correlation coefficients, are included in a prognostic or predictive test in addition to and or in place of disclosed genes.

[0411] Having described the invention, the same will be more readily understood through reference to the following Examples, which is provided by way of illustration, and is not intended to limit the invention in any way.

### Examples

### Example 1

### Microarray Analysis

[0412] Clinically, IBD is characterized by diverse manifestations often resulting in a chronic, unpredictable course. Bloody diarrhea and abdominal pain are often accompanied by fever and weight loss. Anemia is common, as is severe fatigue. Joint manifestations ranging from arthralgia to acute arthritis as well as abnormalities in liver function are commonly associated with IBD. Patients with IBD also have an increased risk of colon carcinomas compared to the general population. During acute “attacks” of IBD, work and other normal activity are usually impossible, and often a patient is hospitalized.

[0413] Although the cause of IBD remains unknown, several factors such as genetic, infectious and immunologic susceptibility have been implicated. IBD is much more common in Caucasians, especially those of Jewish descent. The chronic inflammatory nature of the condition has prompted an intense search for a possible infectious cause. Although agents have been found which stimulate acute inflammation, none has been found to cause the chronic inflammation associated with IBD. The hypothesis that IBD is an autoimmune disease is supported by the previously mentioned extraintestinal manifestation of IBD as joint arthritis, and the known positive response to IBD by treatment with therapeutic agents such as adrenal glucocorticoids, cyclosporine and azathioprine, which are known to suppress immune response. In addition, the GI tract, more than any other organ of the body, is continuously exposed to potential antigenic substances such as proteins from food, bacterial byproducts (LPS), etc. The subtypes of IBD are UC and CD.

[0414] CD differs from UC in that the inflammation extends through all layers of the intestinal wall and involves mesentery as well as lymph nodes. CD may affect any part of the alimentary canal from mouth to anus. The disease is often discontinuous, i.e., severely diseased segments of bowel are separated from apparently disease-free areas. In CD, the bowel wall also thickens which can lead to obstructions. In addition, fistulas and fissures are not uncommon.

[0415] Both UC and CD are typically diagnosed by endoscopy, which shows the afflicted areas. However, the use of microarray technology has shed light on the molecular pathology of UC. A study published in 2000 used microarray technology to analyze eight UC patients. (Dieckgraefe et al., Physiol. Genomics 2000; 4:1-11). 6500 genes were analyzed in this study and the results confirmed increased expression of genes previously implicated in UC pathogenesis, namely IL-1, IL-1RA and IL-8. Endoscopic diagnosis coupled with the ability to take pinch mucosal biopsies have allowed investigators to further diagnose UC using microarray analysis, and allowed investigators to analyze afflicted tissue against normal tissue and to analyze tissue from a larger range of patients with varying degrees of severity. Biopsies of macroscopically unaffected areas of the colon and terminal ileum were microarrayed. (hangman et al., Gastroent. 2004; 127:26-40). Langman analyzed 22,283 genes and found that genes involved in cellular detoxification, such as pregnane X receptor and MDR1 were significantly downregulated in the colon of patients with UC, but there was no change in expression of these genes in CD patients.

[0416] Nucleic acid microarrays, often containing thousands of gene sequences, arc useful for identifying differentially expressed genes in diseased tissues as compared to their normal counterparts. Using nucleic acid microarrays, test and control mRNA samples from test and control tissue samples are reverse transcribed and labeled to generate cDNA probes. The cDNA probes are then hybridized to an array of nucleic acids immobilized on a solid support. The array is configured such that the sequence and position of each member of the array is known. For example, a selection of genes known to be expressed in certain disease states may be arrayed on a solid support. Hybridization of a labeled probe with a particular array member indicates that the sample from which the probe was derived expresses that gene. If the hybridization signal of a probe from a test (for example, disease tissue) sample is greater than hybridization signal of a probe from a control, normal tissue sample, the gene or genes overexpressed in the disease tissue are identified. The implication of this result is that an overexpressed protein in a disease tissue is useful not only as a diagnostic marker for the presence of the disease condition, but also as a therapeutic target for treatment of the disease condition.

[0417] The methodology of hybridization of nucleic acids and microarray technology is well known in the art. In one example, the specific preparation of nucleic acids for hybridization and probes, slides, and hybridization conditions are all detailed in PCT Patent Application Serial No. PCT/US01/10482, filed on Mar. 30, 2001 and which is herein incorporated by reference.

[0418] Microarray analysis was used to find genes that are overexpressed in CD as compared to normal bowel tissue. For this study, sixty seven patients with CD and thirty-one control patients undergoing colonoscopy were recruited. Patient symptoms were evaluated at the time of colonoscopy using the simple clinical colitis activity index (SCCAI). (Walmsley et al., Gut. 1998; 43:29-32). Quiescent disease showing no histological inflammation was defined as a SCCAI of 2 or less. Active disease with histologially acute or chronic inflammation was defined as a SCCAI of greater than 2. The severity of the CD itself was determined by the criteria of Leonard-Jones. (Lennard-Jones Scand. J. Gastroent. 1989; 170:2-6). The CD patients provided well phenotyped biopsies for analysis of inflammatory pathways of CD at the molecular level, thus identifying novel candidate genes and potential pathways for therapeutic intervention. Paired biopsies were taken from each anatomical location.

[0419] All biopsies were stored at −70° C. until ready for RNA isolation. The biopsies were homogenized in 600 μl of RLT buffer (+BME) and RNA was isolated using Qiagen™ Rneasy Mini columns (Qiagen) with on-column DNase treatment following the manufacturer's guidelines, following RNA isolation, RNA was quantitated using RiboGreen™ (Molecular Probes) following the manufacturer's guidelines and checked on agarose gels for integrity. Appropriate amounts of RNA were labeled for microarray analysis and samples were run on proprietary Genentech microarray and Affymetrics™ microarrays. Genes were compared whose expression was upregulated in UC tissue vs normal bowel, matching biopsies from normal bowel and CD tissue from the same patient. The results of this experiment showed that the nucleic acids as shown in Tables 1A, 1B, and 2A (provided above) are differentially expressed in CD and/or UC tissue in comparision to normal tissue.

[0420] The genes listed in Table 1A-1B demonstrated a minimum 1.5 fold difference in expression and also acceptable probe hybridization strength was observed. The genes listed in Table 2 were found to have a minimum within-group Pearson correlation of approximately 0.65 and a three-fold upregulation of gene expression was observed.

[0421] More specifically, the SEQ ID NOS listed in Tables 1A and 2 represent polynucleotides and their encoded polypeptide which are significantly up-regulated/overexpressed in CD and/or UC.

[0422] The SEQ ID NO listed in Table 1B represents a polynucleotide and its encoded polypeptide which is significantly down-regulated/under-expressed in CD and/or UC.

[0423] SEQ ID NOS: listed in Table 3A represent polynucleotides and their encoded polypeptide which are significantly up-regulated/overexpressed in UC.

[0424] SEQ ID NOS: listed in Table 3B represent polynucleotides and their encoded polypeptide which are significantly down-regulated/underexpressed in UC.

### Example 2

### Characterisation of Distinct Intestinal Gene Expression Profiles in Ulcerative Colitis by Microarray Analysis

[0425] Microarray analysis allows a comprehensive picture of gene expression at the cellular level. The aim of this study was to investigate differential intestinal gene expression in patients with ulcerative colitis (UC) and controls.

[0426] Methods: 67 UC and 31 control subjects-23 normal and 8 inflamed non-inflammatory bowel disease patients were studied. Paired endoscopic biopsies were taken from 5 specific anatomical locations for RNA extraction and histology. 41058 expression sequence tags were analyzed in 215 biopsies using the Agilent platform. Confirmation of results was undertaken by real lime PCR and immunohistochemistry. Results: In healthy control biopsies, cluster analysis showed differences in gene expression between the right and left colon. (χ²=25.1, p<0.0001). Developmental genes HOXA13, (p=2.3×10⁻¹⁶), HOXB13 (p<1×10⁻⁴⁵), GLI1 (p=4.0×10⁻²⁴), and GLI3 (p=2.1×10⁻²⁸) primarily drove this separation. When all UC biopsies and control biopsies were compared, 143 sequences had a fold change of >1.5 in the UC biopsies (0.01>p>10⁴⁵ ) and 54 sequences had a fold change of <−1.5 (0.01>p>10⁻²⁰)). Differentially upregulated in UC genes included SAA1 (p<10⁻⁴⁵) the alpha defensins, DHFA5&6 (p=0.00003 and p=6.95×10⁻⁷ respectively), MMP3 (p=5.6×10⁻¹⁰) and MMP7 (p=2.3×10⁻⁷). Increased DEFA5&6 expression was further characterized to Paneth cell metaplasia by immunohistochemistry and in-situ hybridization. Sub-analysis of the IBD2 & IBD5 loci, and the ABC transporter genes revealed a number of differentially regulated genes in the UC biopsies. Conclusions: These data implicate a number of novel gene families, as well as established candidate genes in the pathogenesis of UC, and may allow characterisation of potential therapeutic targets.

[0427] The aim of the current study was to use microarray gene expression analysis to investigate genome wide expression in endoscopic mucosal biopsies of patients with UC and controls. In order to resolve previous inconsistencies and to further delineate inflammatory pathways in UC, substantially more patients and biopsies were included than in previous studies.

[0428] Materials and Methods

[0429] Patients and Controls. Sixty seven patients with UC and 31 control patients who were undergoing colonoscopy were recruited. Their demographics are shown in Table 4.

TABLE 4

| | UC |
|---|---|
| Number of patients | 67 |
| Male/Female | 33/34 |
| Median age at diagnosis (years) | 37 |
| Median duration of follow up (years) | 7.8 |
| Disease Group | |
| New Diagnosis (1) | 8 |
| Quiescent disease (2) | 41 |
| Active disease (3) | 18 |
| Disease extent at time of Endoscopy | |
| Proctitis | 15 |
| L sided colitis | 27 |
| Extensive colitis | 25 |
| Current Smoker | 6 |
| Family history of IBD | 5 |
| 5 ASA Therapy | 40 |
| Corticosteroid therapy | 10 |
| Immunosuppressant therapy (AZA, 6MP, MTX, MMF) | 11 |

[0430] Sixty seven patients with UC and 31 control patients who were undergoing colonoscopy were recruited (Table 4). All UC patients attended the clinic at the Western General Hospital, Edinburgh and the diagnosis of UC adhered to the criteria of Lennard-Jones. (Lennard-Jones J E. Scand J Gastroenterol Suppl 1989;170:2-6) Phenotypie data were collected by interview and case-note review and comprised of demographics, date of diagnosis, disease location, disease behavior, progression, extra-intestinal manifestations, surgical operations, current medication, smoking history, joint symptoms, family history and ethnicity. At the time of colonoscopy patients symptoms were evaluated using the simple clinical colitis activity index (SCCAI). (Walmsley et. al. Gut. 1998;43:29-32)

[0431] Patients were recorded as having a ‘new diagnosis’ of UC if the colonoscopy took place at the time of their index presentation and they had had less than 24 hours of oral/IV therapy. Quiescent disease was defined as a SCCAI of 2 or less and histology showing no inflammation or mild chronic inflammation and active disease was defined as a SCCAI of greater than 2 and histology showing acute or chronic inflammation.

[0432] Eleven of the controls were male, 20 were female with a median age of 43 at the time of endoscopy. Six of the controls had normal colonoscopies for colon cancer screening, 9 controls had symptoms consistent with irritable bowel syndrome and had a normal colonoscopic investigation and 7 patients had a colonoscopy for another indication and histologically normal biopsies were obtained. Eight control patients had abnormal inflamed colonic biopsies (1 pseudomembranous colitis, 1 diverticulitis, 1 amoebiasis, 2 microscopic colitis, 1 eosoinophilic infiltrate, 2 scattered lymphoid aggregates and a history of gastroenteritis). Written informed consent was obtained from all patients. Lothian focal Research Ethics Committee approved the study protocol: REC 04/S1103/22.

[0433] Biopsy Collection. Anatomical location was confirmed by an experienced operator, distance of endoscope insertion and endoscope configuration using a Scope Guide™. Paired biopsies were taken from each anatomical location. One biopsy was sent for histological examination and the other was snap frozen in liquid nitrogen for RNA extraction. Each biopsy was graded histologically, by an experienced gastrointestinal pathologist as having no evidence on inflammation, biopsies with evidence of chronic inflammation and predominately chronic inflammatory cell infiltrate or simply those with acute inflammation and an acute inflammatory cell infiltrate. One hundred and thirty nine paired UC biopsies and 76 paired control biopsies were collected. The number of paired biopsies in UC patients and controls from each anatomical location are shown in Table 5.

TABLE 5

| | UC (n = 67) | Controls (n = 31) |
|---|---|---|
| Total number of paired biopsies | 139 | 76 |
| Terminal Ileum | 4 | 6 |
| Ascending colon | 33 | 17 |
| Descending colon | 35 | 23 |
| Sigmoid colon biopsies. | 57 | 27 |
| Removed from analysis | 10 | 3 |

[0434] RNA Isolation. The biopsies weighed between 0.2 mg and 16.5 mg with a median weight of 5.5 mg. Total RNA was extracted from each biopsy using the micro total RNA isolation from animal tissues protocol (Qiagen, Valencia, Calif.), according to the manufacturer's instructions. To evaluate purity and integrity 1 μL of total RNA was assessed each sample with the Agilent technologies 2100 bioanalyzer using the Pico LabChip reagent set (Agilent Technologies, Palo Alto, Calif.).

[0435] Microarray Analysis. 1 μg of total RNA was amplified using the Low RNA Input fluorescent Linear Amplification protocol (Agilent Technologies, Palo Alto, Calif.). A T7 RNA polymerase single round of linear amplification was carried out to incorporate Cyanine-3 and Cyanine-5 label into cRNA. The cRNA was purified using the RNeasy Mini Kit (Qiagen, Valencia, Calif.). 1 μl of cRNA was quantified using the NanoDrop ND-1000 spectrophotometer (NanoDrop Technologies, Wilmington, Del.).

[0436] 750 ng of Universal Human Reference (Stratagene, La Jolla, Calif.) cRNA labeled with Cyanine-3 and 750 ng of the test sample cRNA labeled with Cyanine-5 were fragmented for 30 minutes at 60° C. before loading onto Agilent Whole Human Genome microarrays (Agilent technologies, Palo Alto, Calif.). The samples were hybridized for 18 hours at 60° C. with constant rotation. Microarrays were washed, dried and scanned on the Agilent scanner according to the manufacturer's protocol (Agilent technologies, Palo Alto, Calif.). Microarray image files were analyzed using Agilent's feature Extraction software version 7.5 (Agilent Technologies, Palo Alto, Calif.). The distribution of log intensities for each sample was plotted and outlier samples (i.e. greater than 2 standard deviations from the mean) were excluded from analysis. 10 UC samples and 3 control samples were designated as outliers using these criteria.

[0437] Real Time PCR. Confirmation real time PCR analysis was carried out on 8 genes—SAA1, IL8, DEFA5, DEFA6, MMP3, MMP7, S100A8 and TLR4. Ten healthy control sigmoid colon biopsies with normal histology, 9 quiescent UC sigmoid biopsies and 11 UC sigmoid biopsies with an acute (6 biopsies) or chronic (5 biopsies) inflammatory cell infiltrate were selected to represent the different disease groups after stratifying to represent a range of SAA1 and IL-8 expression.

[0438] Prior lo RTPCR analysis 1 RNA amplification cycle was carried out using the MessageAmp∩ II aRNA Amplification Kit protocol (Ambion technologies, Austin, Tex.). Reverse transcription PCR was then performed on 50 ng of RNA using Stratagene model MX4000 (La Jolla, Calif., USA). TaqMan primers and probes were manufactured in house (Genentech Inc. South San Francisco, Calif.). The sequences for the forward probe, the reverse probe and the TaqMan probe were as follows—

[0439] SAA1, forward—agcgatgccagagagaata, reverse—ggaagtgattggggtctttg, Taq—etttggccatggtgcggagg, [SEQ ID NO:235]

[0440] IL-8, forward—actcccagtcttgtcattgc, reverse—caagtttcaaccagcaagaa, Taq—tgtgttggtagtgctgtgttgaattacgg, [SEQ ID NO:236]

[0441] DEFA5, forward—gctacccgtgagtccctct, reverse—tcttgcactgctttggtttc, Taq—tgtgtgaaateagtggccgcct, [SEQ ID NO:237]

[0442] DEFA6, forward—agagctttgggctcaacaag, reverse—atgaeagtgcaggtcccata, Taq—cacttgccattgcagaaggtcctg, [SEQ ID NO:238]

[0443] MMP3, forward—aagggaacttgagcgtgaat, reverse—gagtgcttccccttctcttg, Taq—ggcattcaaatgggctgctgc, [SEQ ID NO:239]

[0444] MMP7, forward—cacttcgatgaggatgaacg, reverse—gtcccatacccaaagaatgg, Taq—ctggacggatggtagcagtctaggga, [SEQ ID NO:240]

[0445] S100A8, forward—ttgaccgagctggagaaag, reverse—tcaggtcatecctgtagacg, Taq—tccctgataaaggggaatttccatgc [SEQ ID NO:241] and

[0446] TLR4, forward—agagccgctggtgtatcttt, reverse—ccttctgcaggacaatgaag, Taq—tggcagtttctgagcagtcgtgc [SEQ ID NO:242[.

[0447] PCR conditions comprised of 48° C. for 30 minutes, 95° C. hold for 10 minutes, followed by 40 cycles of 30 second 95° C. melt and 1 minute 60° C. anneal/extend. Absolute quantification of product was calculated by normalizing to RPL19. Results were analyzed using SAS and JMP software (SAS, N.C.).

[0448] In Situ Hybridization for Defensin Alpha 5.

[0449] PCR primers were designed to amplify a 318 bp fragment of DEFA5 spanning from nt 55-372 of NM_{—}021010 (upper—5″ cateccttgctgccattct [SEQ ID NO:243] and lower—5′ gaccttgaactgaatcttgc [SEQ ID NO:244]). Primers included extensions encoding 27-nucleotide T7 or T3 RNA polymerase initiation sites to allow in vitro transcription of sense or antisense probes, respectively, from the amplified products, Endoscopic biopsies were fixed in 10% neutral buffered formalin and paraffin-embedded. Sections 5 μm thick were deparaffinized, deproteinatcd in 10 ug/ml Proteinase K (Amresco) for 45 minutes at 37° C., and further processed for in situ hybridization as previously described. (Jubb et. al. Methods Mol Biol. 2006;326:255-264) ³³P-UTP labeled sense and antisense probes were hybridized to the sections at 55° C. overnight. Unhybridized probe was removed by incubation in 20 μg/ml RNase A for 30 min al 37° C., followed by a high stringency wash at 55° C. in 0.1×SSC for 2 hours and dehydration through graded ethanols. The slides were dipped in NTB nuclear track emulsion (Eastman Kodak), exposed in sealed plastic slide boxes containing desiccant for 4 weeks al 4° C., developed and counterstained with hematoxylin and eosin.

[0450] Immunohistochemistry for Rabbit Anti-Human Lysozyme and Rabbit Anti-Human Defensin Alpha 6

[0451] Formalin fixed paraffin embedded tissue sections were rehydrated prior to quenching of endogenous peroxidase activity (KPL, Gathersburg, Md.) and blocking of avidin and biotin (Vector. Burlingame, Calif.). Sections were blocked for 30 minutes with 10% normal goat serum in PBS with 3% BSA. Tissue sections were then incubated with primary antibodies for 60 minutes at room temperature, biotinylated secondary antibodies for 30 min, and incubated in ABC reagent (Vector, Burlingame, Calif.) for 30 minutes followed by a 5 minute incubation in metal enhanced DAB (Pierce, Rockford, Ill.). The sections were then counterstained with Mayer's hematoxylin. Primary antibodies used were rabbit anti-human lysozyme at 5.0 μg/ml (Dako, Carpinteria, Calif.) and rabbit anti-human DEFA6 at 5.0 μg/ml (Alpha Diagnostics, SanAntonio, Tex.). Secondary antibody used was biotinylated goat anti-rabbit IgG at 7.5 μg/ml (Vector, Burlingame, Calif.). DEFA6 alpha staining required pre-treatment with Target Retrieval High pH (Dako, Carpenteria, Calif.) at 99° C. for 20 minutes, lysozyme staining did not require pretreatment. All other steps were performed at room temperature.

[0452] Data Analysis. Microarray data were analyzed using the Rosetta Resolver software (Rosetta Inpharmatics, Seattle). Statistical significance of the microarray data was determined by Student's unpaired t test, p<0.01 and a fold change of greater or less than 1.5 were considered statistically significant. Fold change data was calculated using the Rosetta Resolver software. Gene ontology was analyzed using Ingenuity software (Ingenuity Systems, Mountain View, Calif.). The Mann-Whitney U test was used to analyze the real time PCR data. p<0.05 was considered significant.

[0453] Results

[0454] Influence of anatomical location on gene expression in the healthy colon and terminal ileum. 56 histologically normal biopsies from control patients were analyzed by unsupervised hierarchical clustering. Clear separation by anatomical location was observed on one side of the dendrogram 25/25 biopsies were from the left colon (descending colon or sigmoid colon) where as on the other side of the dendrogram 20/31 biopsies were from the ascending colon (χ=25.1, p<0.0001) (FIG. 1). 6/6 of the terminal ileal biopsies were clustered together. Biopsies from individual patients did not cluster together. The genes driving the differential expression between the right and left colon that were causing the observed clustering were predominately involved in the embryological development of the GI tract-HOXA13, (FC +4.93, p=2.3×10⁻¹⁶), HOXB13 (FC +16.96, p<1×10⁻⁴⁵), GLI1 (FC +2.2, p=4.0×10⁻²⁴), and GLI3 (FC +2.3, p=2.1×10⁻²⁸) were all upregulated in the left colon.

[0455] Analysis of expression in UC and control biopsies.

[0456] Using unsupervised hierarchical clustering we were unable to differentiate between biopsies from UC patients and controls patients. In addition no clustering based on the inflammation status of the biopsies was observed. The only clustering that was observed was with biopsies from the terminal ileum where both UC and control biopsies clustered together. When all of the UC biopsies (129) and control biopsies (73) were compared, 143 sequences had a fold change of greater than 1.5 in the UC biopsies (0.01>p>10⁻⁴⁵) and 54 sequences had a fold change of less than 1.5 (0.01>p>10⁻²⁰)) (data not shown).

[0457] Serum amyloid A1 (SAA1) was the most up regulated gene (Fold change (FC) +8.19, p<10⁻⁴⁵). Other notably upregulated genes were S100A8 (FC +3.50, p=2.3×10¹⁷), S100A9 (FC +3.06, p=4.1×10⁻¹³), the alpha defensins, alpha 5 (DEFA5) (FC +3.25, p=0.00003), alpha 6 (DEFA6) (FC +2.18, p=6.95×10⁻⁷) and the matrix metalloproteinases MMP3 (FC +2.17, p=5.6×10⁻¹⁰) and MMP7 (FC +2.29, p=2.3×10⁻⁷).

[0458] A list of the genes found to be differentially expressed in UC patients when compared to normal patients can be found in Tables 1A, 1B, and 2A as described above.

[0459] The differential gene expression of a number of candidate genes across more than one experiment is shown in Table 6. Table 6 shows fold changes and p values are shown in a number of different genes in four different experiments. The number of biopsies analyzed in each experiment is shown in brackets. Significant consistent changes in expression across more than one experiment were observed for the genes of interest in this table.

TABLE 6

| | | | Non-inflamed | | | | Inflamed UC | |
|---|---|---|---|---|---|---|---|---|
| | | | UC | | Inflamed UC | | sigmoid (35) | |
| | All UC (129 | | sigmoid (22) v | | sigmoid (35) v | | v | |
| | biopsies) v | | non-inflamed | | inflamed | | non-inflamed | |
| | controls (73 | | control sigmoid | | control sigmoid | | sigmoid UC | |
| Genes | biopsies) | | (18) | | (8) | | (22) | |
| Analyzed | Fold change | p value | Fold change | p value | Fold change | p value | Fold change | p value |
| SAA1 | +8.19 | <10⁻⁴⁵ | +2.0 | 0.00024 | +17.5 | 2.9 × 10⁻²¹ | +16.51 | <10⁻⁴⁵ |
| Def alpha 5 | +3.25 | 0.00003 | +1.02 | 0.89 | +7.27 | 6.3 × 10⁻³⁰ | +8.44 | <10⁻⁴⁵ |
| Def alpha 6 | +2.18 | 6.95 × 10⁻⁷ | −1.09 | 0.34 | +4.41 | 9.7 × 10⁻⁹ | +6.72 | 4.16 × 10⁻¹⁹ |
| S100A8 | +3.50 | 2.3 × 10⁻¹⁷ | +1.21 | 0.19 | +9.75 | 2.4 × 10⁻²⁴ | +6.84 | 1.16 × 10⁻¹⁹ |
| S100A9 | +3.06 | 4.1 × 10⁻¹³ | +1.05 | 0.16 | +7.53 | 6.4 × 10⁻¹² | +7.11 | 1.96 × 10⁻³² |
| MMP3 | +2.17 | 5.6 × 10⁻¹⁰ | −1.55 | 0.0088 | +11.0 | 1.22 × 10⁻³⁷ | +8.15 | 2.32 × 10⁻³⁵ |
| MMP7 | +2.29 | 2.3 × 10⁻⁷ | +1.16 | 0.080 | +7.31 | 4.9 × 10⁻²⁴ | +5.53 | 1.01 × 10⁻²³ |
| IL8 | +2.05 | 4.2 × 10⁻¹¹ | +1.10 | 0.26 | +6.36 | 9.27 × 10⁻¹⁷ | +7.24 | 8.42 × 10⁻¹⁹ |
| TLR4 | +1.34 | 4.5 × 10⁻⁷ | +1.15 | 0.18 | +1.50 | 0.0044 | +1.54 | 0.00073 |
| TNIP3 | +8.02 | 1.1 × 10⁻¹⁷ | −1.30 | 0.20 | +7.53 | 2.93 × 10⁻¹³ | +10.5 | 1 × 10⁻³⁸ |
| CCL20 | +1.30 | 0.00011 | +1.25 | 0.020 | +1.79 | 0.00002 | +2.36 | 4.68 × 10⁻¹¹ |
| ABCB1 | −1.32 | 0.00091 | +1.10 | 0.40 | −1.82 | 5.6 × 10⁻⁶ | −1.92 | 9.0 × 10⁻¹⁰ |
| HLA-DRB1 | +1.03 | 0.88 | −3.0 | 0.0010 | +3.30 | 0.033 | +2.67 | 0.0011 |
| TSLP | −1.12 | 0.31 | −2.73 | 2.7 × 10⁻¹⁰ | −1.15 | 0.61 | +1.23 | 0.092 |

[0460] Gene ontology analysis involving the genes differentially expressed between the UC and control biopsies showed a preponderance of differentially expressed genes were involved in immune response (48 genes out of a total of 679 genes classified under immune response, p=2.1×10⁻⁹, OR 2.61, CI 1.85-3.56) and response to wounding (30 genes out of a total of 359 genes classified under response to wounding, p=6.42×10⁻⁹, OR 3.14, CI 2.09-4.53) when biological systems were considered.

[0461] Analysis of expression in sigmoid colon biopsies in patients with quiescent UC and non-inflamed control biopsies. To compare expression in biopsies without an acute inflammatory signal and to remove the effect of anatomical variation, 22 biopsies from the sigmoid colon with no histological evidence of inflammation from patients with UC were compared to 18 histologically normal control sigmoid colon biopsies. 102 sequences had a fold change greater than 1.5 (0.01>p>4.77×10⁻¹³) and 84 sequences had a fold change of less than 1.5 (0.01>p>1.8×10⁻²¹) (data not shown).

[0462] Upregulated genes included defensin beta 14 (FC +2.11, p=0.00002) and SAA1 (FC +2.01, p=0.00024). Interesting genes that were down regulated included HLA-DRB1 (FC −3.0, p=0.0010) and TSLP (FC −2.73, p=2.7×10⁻¹⁰) (Table 6).

[0463] Analysis of expression in sigmoid colon biopsies in patients with active UC and inflamed control biopsies. Expression of 35 histologically inflamed sigmoid biopsies from patients with UC were compared to 8 histologically inflamed control sigmoid biopsies. Reflecting the more severe inflammation in the UC biopsies a number of genes involved in the acute inflammatory response were upregulated in the UC biopsies v the control biopsies-SAA1 (FC +17.5, p=2.9×10⁻²¹), MMP3 (FC +11.0, p=1.22×10⁻³⁷), MMP7 (FC +7.31, p=4.9×10⁻²⁴) and IL-8 (FC +6.36, p=9.27×10⁻¹⁷) (Table 6). Overall 623 sequences had a fold change of greater than 1.5 and 509 sequences had a fold change of −1.5 or less (p<0.01) (data not shown).

[0464] Inflamed versus non-inflamed UC sigmoid colon biopsies. When expression signals were compared between 35 histologically inflamed and 22 non-inflamed sigmoid colon UC biopsies 700 sequences had a fold change of greater than 1.5 (0.01>p>1×10⁻⁴⁵) and 518 sequences (0.01>p>1×10⁻⁴⁵) had a fold change of less than 1.5 in the inflamed biopsies (data not shown).

[0465] Notably upregulated genes included SAA1 (FC +16.51, p<10⁻⁴⁵), TNFAIP3 interacting protein 3 (TNIP3) (FC +10.5, p=1×10⁻³⁸), DEFA5 (FC +8.44, p=<10⁻⁴⁵), DEFA6 (FC +6.72, p=4.16×10⁻¹⁹) and regenerating islet-derived 3 gamma (REG3γ) (FC +6.99, p=<10⁻⁴⁵).

[0466] Analysis of Specific Gene Families-Alpha Defensins 5 and 6.

[0467] Expression of a number of genes of interest was further analysed, taking into consideration anatomical location and degree of inflammation in the UC samples. When DEFA5 and DEFA6 were analysed expression in the normal controls and the non-inflamed UC biopsies was similar across the different anatomical locations with there being high expression in the terminal ileum, and expression decreasing as the biopsy location became more distal in the colon (FIG. 2).

[0468] In FIG. 2, the expression of each array sample is plotted against the Agilent universal reference. Each endoscopic biopsy has been separated by patient status, biopsy inflammation status and anatomical location. The mean expression levels for each anatomical location are linked in blue. High alpha defensin 5 (panel A) and 6 (B) (DEFA5 and DEFA6) expression levels are seen in the terminal ileum of the controls and the non inflamed UC samples. The expression in these 2 groups decreased the more distally in the colon the biopsies were retrieved from. In the acute and chronically inflamed UC samples and to a lesser extent in the inflamed control samples there was a marked increase in DEFA5 and DEFA6 expression throughout the ascending, descending and sigmoid colon-sigmoid colon inflamed v non-inflamed UC samples (FC +8.44, p=<10⁻⁴⁵) for DEFA5, (FC +6.72, p=4.16×10⁻¹⁹) for DEFA6.

[0469] In the acute and chronically inflamed UC biopsies there was marked upregulation of DEFA5 and DEFA6 expression throughout the ascending, descending and sigmoid colon (Table 6).

[0470] Matrix metalloproteinases 3 and 7.

[0471] Increased expression of MMP3 and MMP7 was observed in the acutely and chronically inflamed UC biopsies when compared to the non-inflamed UC biopsies-sigmoid colon inflamed v non-inflamed UC samples MMP3 (FC +8.15, p=2.3×10⁻³⁵) and MMP7 (FC +5.53, p=1.0×10⁻²³) (FIG. 3).

[0472] In FIG. 3, the expression of each array sample is plotted against the Agilent universal reference. Each endoscopic biopsy has been separated by patient status, biopsy inflammation status and anatomical location. The mean expression levels for each anatomical location are linked in blue. Increased expression of MMP3 (panel A) and MMP7 (B) was observed in the acutely and chronically inflamed UC biopsies when compared to the non inflamed UC biopsies-sigmoid colon inflamed v non inflamed UC samples MMP3 (FC +8.15. p=2.3×10⁻³⁵) and MMP7 (FC +5.53, p=1.0×10⁻²³). In contrast when the inflamed and non-inflamed control samples were analysed, a decrease in the expression levels of MMP3 and MMP7 in the inflamed control biopsies was observed (FC −1.62, p=0.012 and FC −2.0, p=0.0002 respectively).

[0473] ATP-binding cassette (ABC) transporter family and the Xenobiotic-transcription regulators. To further investigate this gene family, expression patterns from probes representing 48 transcriptional genes and their key mediators (PXR, FXR, LXR and CAR) were analysed. When these genes were compared in all the UC and control biopsies, 7 genes were found to significantly down regulated in the UC samples when compared to the control samples-ABCA1 (p=0.01), ABCA8 (p=0.0064), ABCB1 (p=0.0091), ABCC6 (p=0.0050), ABCB7 (p=0.0068), ABCF1 (p=0.0005) and ABCF2 (p<0.00001). Only one probe representing ABCB2 was significantly upregulated in UC (p=0.0048).

[0474] A number of ABC genes were found to be down-regulated in IBD patients as compared to normal patients (data not shown). The changes observed in ABCB1 expression appeared to be primarily driven by the inflamed UC biopsies which were significantly downregulated when compared to the non-inflamed UC biopsies in the sigmoid colon (FC −1.82, p=5.6×10⁻⁶)(Table 6). Of interest, no difference in the expression of PXR between UC and controls was observed in any of the analysis including disease location and activity.

[0475] RTPCR Analysis. In the case of 8 genes implicated by microarray expression results, confirmatory real lime PCR analysis using 10 healthy control colon sigmoid biopsies with normal histology, 9 quiescent UC sigmoid biopsies and 11 UC sigmoid biopsies with an acute (6 biopsies) or chronic (5 biopsies) inflammatory cell infiltrate was undertaken. Increased SAA1 expression in the inflamed UC sigmoid colon biopsies compared to the normal control sigmoid colon biopsies and the non-inflamed UC sigmoid colon biopsies (p=0.041 and p=0.044 respectively) was observed. Elevated IL-8 expression was also confirmed in the inflamed UC sigmoid biopsies when compared to the control sigmoid biopsies (p=0.031) and a trend was observed towards there being higher IL-8 expression in the inflamed UC sigmoid colon biopsies when compared to the non-inflamed UC biopsies (p=0.089) (FIG. 4).

[0476] FIG. 4 shows the real time PCR expression data comparing expression in 10 healthy control sigmoid biopsies with normal histology, 9 quiescent UC sigmoid biopsies and 11 UC sigmoid biopsies with an acute or chronic inflammatory cell infiltrate. Expression of SAA1 (A), IL-8 (B), defensin alpha 5 (C) and defensin alpha (D) were compared between the control and the inflamed and non-inflamed UC biopsies. Standard error bars are illustrated in green in each graph.

[0477] Increased expression of DEFA5 and DEFA6 in the inflamed UC sigmoid colon biopsies when compared to the non-inflamed UC sigmoid colon biopsies (p=0.0008 and p=0.0005 respectively) and the control sigmoid colon biopsies (p=0.0002 and p=0.0001 respectively) was observed (FIG. 4). Increased expression in the inflamed UC sigmoid colon biopsies when compared to the non inflamed UC sigmoid colon biopsies was also observed when MMP7, (p=0.0005), S100A8, (p=0.0029) and TFR4, (p=0.019) were examined (FIG. 5).

[0478] FIG. 5 shows the real time PCR expression data comparing expression in 10 healthy control sigmoid biopsies with normal histology, 9 quiescent UC sigmoid biopsies and 11 UC sigmoid biopsies with an acute or chronic inflammatory cell infiltrate. Expression of MMP3 (A), MMP7 (B), S100A8 (C) and TFR4 (D) were compared between the different patient groups. Standard error bars are illustrated in green in each graph. No significant change in MMP3 expression was observed when the inflamed, non-inflamed UC sigmoid colon biopsies and the control sigmoid colon biopsies were analysed.

[0479] In-Situ Hybridization and Immunohistochemistry.

[0480] To further investigate the cellular localization of the excess DEFA5 & 6 expression in the colon of patients with UC, in-situ hybridization and immunohistochemistry was undertaken in a cohort of biopsies of patients with UC and controls (FIGS. 6 and 7).

[0481] FIG. 6 shows the in-situ hybridization of the terminal ileal biopsies for DHFA5 showed strong hybridization in the basal crypts consistent with Paneth cell location. In the upper panel terminal ileum (TI), the antisense probe shows strong hybridization in the basal crypts consistent with Paneth cell location. In the lower panel terminal ileum (TI), no significant hybridization was observed with sense control probe. Panel A shows the sigmoid colon biopsy of a non-inflamed control patient. Panels B,C, & D show strong, multifocal hybridization in the basal crypt region of UC sigmoid colon biopsies consistent with Paneth cell metaplasia. In the UC biopsies taken from the sigmoid colon strong, multifocal hybridization in the basal crypt region of these biopsies was observed and this would be consistent with Paneth cell metaplasia. This was not observed in the non-inflamed control biopsies.

[0482] FIG. 7 shows the in-situ hybridization of the terminal ileal biopsies for DHFA6. In panel A, terminal ileum immunohistochemistry shows positive staining in the basal crypts consistent with Paneth cell location. In panels B & C, no significant staining was observed in the non-inflamed control patients. In panels D, F, & F, strong, multifocal staining in the basal crypt region of UC sigmoid colon biopsies consistent with Paneth cell metaplasia. Immunohistochemistry for DEFA6 confirmed that in the sigmoid colon UC biopsies, staining was observed in the basal crypt region of these biopsies consistent with Paneth cell metaplasia. Again, this was not observed in the non-inflamed control biopsies (FIG. 7).

[0483] Expression of Genes within the IBD2 Locus. Using the markers defining the IBD2 locus we identified 526 Agilent probes representing genes or expressed sequence tags within this locus on chromosome 12. 12 probes had a greater or less than 1.5 fold change in expression with p<0.01 when expression of acute and chronically inflamed UC sigmoid colon biopsies were compared to non-inflamed UC sigmoid colon biopsies (Table 7).

TABLE 7

| | | UC | |
|---|---|---|---|
| | | sigmoid inflamed | |
| | | (35 biopsies) v non- | |
| | | inflamed (25) fold | |
| Agilent Probe | Gene Symbol | change | p value |
| A_23_P98876 | SLC39A5 | −1.52855 | 1.36 × 10⁻⁷ |
| A_24_P647146 | HDAC7A | 1.53876 | 3.15 × 10⁻¹⁶ |
| A_24_P941773 | DKFZP586A0522 | −2.27306 | 2.31 × 10⁻¹¹ |
| A_24_P945113 | ACVRL1 | 1.57956 | 6.33 × 10⁻⁹ |
| A_23_P128230 | NR4A1 | 1.81844 | 0.00005 |
| A_23_P331098 | K5B | 2.3845 | 0.0004 |
| A_24_P246636 | A_24_P246636 | −1.69754 | 7.06 × 10⁻⁸ |
| A_23_P2233 | SILV | 1.51557 | 9.07 × 10⁻⁹ |
| A_23_P105251 | GLI | −1.54447 | 7.73 × 10⁻⁹ |
| A_32_P3783 | HMGA2 | −1.94107 | 2.37 × 10⁻⁹ |
| A_23_P162300 | IRAK3 | 1.7382 | 3.11 × 10⁻¹⁵ |
| A_32_P83256 | IRAKM | 1.70847 | 4.56 × 10⁻¹⁰ |

[0484] Analysis of the 526 expression probes located within the IBD2 locus identified 12 probes that were significantly differentially regulated when the inflamed UC sigmoid colon biopsies were compared to the non-inflamed UC sigmoid colon biopsies.

[0485] Table 3A (provided above) lists those genes from the IBD2 locus on chromosome 12 that were found to be up-regulated in IBD patients as compared to normal patients.

[0486] Table 3B (provided above) lists those genes from the IBD2 locus on chromosome 12 that were found to be down-regulated in IBD patients as compared to normal patients.

[0487] Interesting candidate genes that were differentially regulated in the inflamed UC sigmoid samples included keratin 5B (FC +2.38, p=0.0004), MMP19 (FC +1.95, p=0.0084), GLI 1(FC −1.54, p=7.3×10⁻⁹), interleukin-1 receptor-associated kinase 3 (FC +1.74, p=3.1×10⁻¹⁵) and interleukin-1 receptor-associated kinase M (FC +1.71, p=0.0014).

[0488] When the acute inflammatory signal was removed and non-inflamed UC sigmoid biopsies and non-inflamed control sigmoid biopsies were compared, no sequences had a fold change greater or less than 1.5. However, notably downregulated genes included tubulin alpha 5 (FC −1.32, p=9.0×10⁻⁶) and tubulin alpha 6 (FC −1.45, p=1.2×10⁻⁵), molecules involved in the microtubule cytoskeleton and barrier integrity of the bowel.

[0489] Expression of Genes within the IBD5 Locus. Agilent probes representing 11 genes within the with IBD5 locus were identified and compared in healthy control, non-inflamed and inflamed UC biopsies (Table 8). Table 8 shows the fold changes in expression of genes within the IBD5 locus comparing controls and patients with UC, who have been stratified for the degree of inflammation observed in their sigmoid biopsies. Significant down regulation of the organic cation transporters SLC22A4 and SLC22A5 was observed when inflamed UC sigmoid biopsies were compared to non-inflamed UC sigmoid biopsies.

TABLE 8

| | | | Inflamed sigmoid | | | |
|---|---|---|---|---|---|---|
| | All UC (129) | | (35) v non-inflamed | | Non-inflamed UC sigmoid | |
| Genes | v controls (73) | | sigmoid (22) (UC) | | (22) v non inflamed control | |
| Analyzed | Fold change | p value | Fold change | p value | sigmoid (18) Fold change | p value |
| IL4 | +1.00 | 0.96 | +1.06 | 0.62 | +1.14 | 0.40 |
| IL13 | +1.12 | 0.057 | −1.02 | 0.82 | 1.00 | 0.98 |
| RAD50 | +1.02 | 0.20 | −1.20 | 3.5 × 10⁻⁶ | +1.08 | 0.062 |
| IL5 | +1.09 | 0.037 | +1.10 | 0.17 | +1.04 | 0.53 |
| IRF1 | +1.10 | 0.35 | +1.12 | 2.9 × 10⁻⁶ | −1.01 | 0.62 |
| SLC22A5 | −1.26 | 3.37 × 10⁻⁶ | −1.50 | 2.2 × 10⁻⁶ | +1.02 | 0.75 |
| SLC22A4 | −1.18 | 0.11 | −1.79 | 1.53 × 10⁻⁹ | +1.22 | 0.63 |
| PDLIM4 | +1.10 | 0.0056 | +1.14 | 0.00039 | +1.01 | 0.78 |
| P4HA2 | −1.05 | 0.13 | 1.00 | 0.98 | −1.05 | 0.28 |
| CSF2 | +1.10 | 0.056 | +1.19 | 0.052 | −1.04 | 0.63 |
| IL3 | −1.01 | 0.39 | +1.02 | 0.67 | +1.01 | 0.75 |

[0490] Table 3A (provided above) lists those genes from the IBD5 locus on chromosome 5 that were found to be up-regulated.

[0491] Non significant, but consistent fold increases in expression were observed when IRF1 and PDLIM4 expression was compared in inflamed and non-inflamed UC sigmoid colon biopsies, (FC +1.12, p=2.9×10⁻⁶ and FC +1.14, p=0.00039, respectively).

[0492] Table 3B (provided above) lists those genes from the IBD5 locus on chromosome 5 that were found to be down-regulated in IBD patients as compared to normal patients. SLC22A5 (OCTN2) was downregulated in UC biopsies compared to controls (FC −1.26 p=3.37×10⁻⁶) and when inflamed UC sigmoid colon biopsies were compared to non-inflamed UC sigmoid colon biopsies (FC −1.50, p=2.2×10⁻⁶). Expression of SLC22A4 (OCTN1) was also downregulated in inflamed UC sigmoid colon biopsies compared to non-inflamed UC sigmoid colon biopsies (FC −1.79, p=1.5×10⁻⁹), however when all UC biopsies were compared to controls, no change was observed (FC −1.18, p=0.11).

[0493] Gene Expression and Disease Activity. Sigmoid colon biopsies from newly diagnosed UC patients who were undergoing endoscopy (8 biopsies) and sigmoid biopsies from patients with established active UC (18 biopsies) were compared. In the newly diagnosed UC sigmoid biopsies, 861 sequences were upregulated with a fold change of greater than 1.5 and p<0.01, and 373 sequences were downregulated with a fold change of less than 1.5 and p<0.01 (data not shown).

[0494] The 3 most upregulated genes in the newly diagnosed patients were Selectin E (FC +10.95, p=1.8×10⁻⁶), CCL19 (FC +7.42, p=4.7×10⁻¹⁵) and IL-8 (FC +7.32, p=2.9×10⁻⁷), and down regulated genes included S100P (FC −6.4, p=2.0×10⁻⁹).

[0495] Sigmoid colon biopsies from patients from UC patients with a simple clinical colitis activity index (SCCAI) of more than 2 (27 biopsies) were compared to sigmoid colon biopsies from UC patients with a SCCAI of 2 or less (30 biopsies). 813 sequences were upregulated and 444 sequences were downregulated. Among the most upregulated genes were those that were involved in the acute inflammatory response IL-8 (FC +8.86, p=4.4×10⁻¹²), MMP3 (FC +6.5, p=3.2×10⁻¹⁹), MMP7 (FC −5.3, p=3.4×10⁻²¹) and DEFA6 (FC +4.5, p=2.7×10¹²). Down regulated genes included UGT2B15 (FC −4.5, p=0.0013), UGT2B17 (FC −2.8, p=0.0059) and UGT2B10 (FC −2.2, p=0.0038), all members of the UGT family which are involved in cellular detoxification and excretion.

[0496] Table 3A (provided above) lists additional genes identified in the present study observed to be up-regulated in UC patients as compared to normal patients, while Table 3B (provided above) lists additional genes identified in the present study observed to be down-regulated in UC patients as compared to normal patients.

[0497] Discussion

[0498] The present study represents the most rigorous microarray analysis yet reported comparing intestinal gene expression in patients with UC, with healthy controls as well as in patients with other causes of colonic inflammation. The data provide important information on anatomical pattern of gene expression in the healthy colon, with intriguing differences in the right and left colon. Moreover, strong evidence for dysregulated gene expression characteristic of UC has been provided and overall these data provide valuable insight into gene expression in normal physiological homeostasis and during the pathological process of UC.

[0499] The strengths of this data set are the size of the study undertaken, the meticulous assessment of disease phenotype, the documenting of anatomical location for each biopsy and the avoidance of confounding effects due to pooling of samples. Thereby, we have been able to remove a considerable amount of background variability that has hampered previous studies. (Marshall E. Science 2004;306:630-631; Ioannidis J P. Lancet 2005;365:454-455).

[0500] Moreover, the present study has addressed the potentially critical confounding effect of the strength of the non-specific acute inflammatory signature. Quiescent biopsies from patients with UC and controls were compared and from these analysis we were able to gain valuable insight into the pathogenesis of UC. In addition, the present study provided access to a proportion of patients with newly diagnosed disease, overcoming treatment related alterations in gene expression. A further strength of our study has been the fact that real time PCR analysis consistently confirmed the significant changes of in expression in all but one of the candidate genes of interest, strongly validating the microarray data and increasing substantially the confidence associated with the interpretation of the data.

[0501] This is the first microarray study to show a gradient in expression of a number of genes along the healthy adult colon. These results contrast with data from Costello and colleagues where no significant differences in expression patterns were observed when comparing biopsies from caecum, transverse colon, descending colon and sigmoid colon (Costello C M, et al. PLoS Med 2005;2:e199). The observed differences in these data sets may be explained by our analysis looking only at non-inflamed control samples where as Costello investigated control and diseased patients.

[0502] Genes involved in developmental pathways—the HOX family and the hedgehog signaling pathway appeared to be the most differentially regulated along the anatomical length of the healthy colon. HOXA13 has been shown play a crucial role in the development of the tail gut and mutations in the gene result in urogenital abnormalities, (De Santa et. al. Development. 2002;129:551-561) and interestingly it has been shown that HOXB13 expression is down regulated in colorectal tumours from the distal left colon. (Jung et. al. Br J Cancer. 2005;92:2233-2239)

[0503] The hedgehog signaling pathway is also crucial to the normal growth and development of the human gastrointestinal system and a number of congenital diseases that affect the gut are due to mutations in genes involved in this pathway. (Lees et. al. Gastroenterology. 2005; 129:1696-1710) GLI-1 is one of the major effector molecules of the hedgehog signaling pathway and the GLI-1 gene lies within the IBD2 locus, an area that has previously been shown to be associated with UC. (Parkes et. al. Am J Hum Genet. 2000;67:1605-1610; Satsangi, et. al., Nat. Genet. 1996;14:199-202) Data from the present study would also suggest that GLI-1 is downregulated in inflamed UC biopsies compared to non inflamed biopsies from patients with UC. Recent data from our unit has shown a strong association between mutations in the GLI-1 gene and UC. (Lees et. al. Gastroenterology. 2006;130:A52)

[0504] Further recent data published by Varnat and colleagues have suggested that PPARβ negatively regulates Paneth cell differentiation by downregulating the expression of Indian hedgehog, another of the major effector molecules in the hedgehog signaling pathway. (Varnat et. al. Gastroenterology. 2006;131:538-553) Our data have shown upregulation of the alpha defensins 5 and 6 in the colon of patients with inflamed UC compared to non-inflamed biopsies from patients with UC and controls, and immunohistochemistry and in-situ hybridization have shown that this is largely mediated by Paneth cell metaplasia. It is intriguing to speculate that in patients with UC, further as yet undetermined defects in the Hedgehog signaling pathway may result in unregulated Paneth cell differentiation, Paneth cell metaplasia, increased alpha defensin 5 and 6 expression, and mucosal inflammation.

[0505] Indeed among the most stimulating observations in the present study were the data showing the upregulation of the alpha defensins 5 and 6 in patients with UC. Alpha defensins 5 and 6 are small cationic proteins that are part of the innate immune response and they have potent antimicrobial properties against gram positive and gram negative bacteria. (Ouellette A J. Springer Semin Immunopathol. 2005;27:133-146) They are stored as pro-molecules in Paneth cells which in the healthy colon are largely restricted to the terminal ileum and on release into the mucosa they are cleaved by trypsin to the active antimicrobial peptide. (Ghosh et. al. Nat Immunol. 2002;3:583-590)

[0506] In our data set, high levels of alpha defensin expression were observed in the terminal ileal biopsies of non-inflamed controls and patients with UC. Levels of expression in the control patients and patients with quiescent UC fell as the location that the biopsies were retrieved from became more distal in the colon—ascending colon, descending colon and sigmoid colon. However, in the inflamed UC biopsies increased expression of both alpha defensins 5 and 6 was observed at each anatomical location that was biopsied. Lawrance and colleagues also noted the defensins alpha 5 and 6 were upregulated in patients with UC compared to controls, (Lawrance et. al. Hum Mol Genet. 2001;10:445-456) although, RNA was extracted from surgical resections and no details about the anatomical location of these specimens were given.

[0507] Recent data examining the expression of the alpha defensins 5 and 6 in patients with CD in the terminal ileum would suggest that expression levels are reduced irrespective of the degree of inflammation when compared to control terminal ileal tissue and this may be responsible for the terminal ileal phenotype observed in CD. (Wehkamp et. al. Proc Natl Acad Sci USA. 2005;102:18129-18134) Whether the observed increase in alpha defensin 5 and 6 expression in our data set is a primary phenomenon related to disease pathogenesis, or whether it is secondary phenomenon protecting a previously damaged epithelial surface to microbial invasion may be resolved by looking for critical variants within these genes that are associated with disease susceptibility and altered function of these peptides.

[0508] It is of interest that many but not all of our results are broadly in line with two of the landmark microarray papers in IBD. Consistent with data from Lawrance and colleagues (Lawrance et. al. Hum Mol Genet. 2001;10:445-456) we have shown upregulation of S100A8 & A9 and the alpha defensins 5 & 6 in UC. However, no overlap was observed in the differentially expressed probes in the IBD2 locus in the present study and in that of Lawrance. Dieckgraefe and colleagues (Dieckgraefe et. al. Physiol Genomics. 2000;4:1-11) observed upregulation of a number of the MMP genes, consistent with our data and interestingly members of the REG family were shown to be upregulated in the colon of patients with UC, probably as a result of Paneth cell metaplasia.

[0509] The downregulation of ABCB1 in our dataset is of significant interest, and consistent with earlier microarray data from hangman, Dieckgraefe and Lawrance and colleagues. (Dieckgraefe et. al. Physiol Genomics. 2000;4:1-11; Lawrance et. al. Hum Mol Genet. 2001;10:445-456; Langmann et. al. Gastroenterology. 2004;127:26-40) In addition to this, we have observed that the expression in ABCB1 displayed a decreasing gradient, with gene expression lowest in the sigmoid colon in UC. This pattern of expression is perhaps consistent with the hypothesis associating loss-of-function of P-glyeoprotein (gene product of ABCB1) in UC, and in line with the clinical presentation of UC. The current data illustrate the importance of ABCB1 in the disease pathogenesis of UC, as highlighted in recent genetic and animal functional data. (Moodie et. al. Glucocorticoid access and action in the rat colon: expression and regulation of multidrug resistance 1a gene (mdr1a), glucocorticoid receptor (GR), mineralocorticoid receptor (MR) and 11-beta-hydroxysteroid dehydrogenase type 2 (11BHDS2). 197 ed. 2003)

[0510] ABCB1 encodes P-glycoprotein 170, an efflux epithelial transporter involved in gut barrier defence and xenobiotic metabolism. It is pertinent that when the entire class of proteins sharing homology with ABCB1 were analyzed, a further 6 out of 48 genes (12.5%) of the ABC transporters were significantly dysregulated in UC; suggesting an important role in this class of protein in the aetiopathogenesis of UC.

[0511] In contrast to data produced by Langmann we did not observe any changes in expression of the transcriptional regulator Pregnane-X receptor. These negative data are consistent with genetic studies carried out in the IBD population in Edinburgh-using a haplotype tagging approach, there was an association between the ABCB1 gene and UC, (Ho et. al. Mum Mol Genet. 2006;15:797-805) but no association between the Pregnane-X receptor and UC. (Ho G T et. al. Gut. 2006;55:1676-1677) Aspects of study design may explain the differences observed in this context between our data and those of Langmann and colleagues, as our analysis took in to consideration the inflammation status of the biopsies and anatomical location. In our data set we did not pool samples, thus carrying out a large number of microarrays, where as Langmann and colleagues pooled terminal ileal and colon biopsies and this difference in methodology may also account for the different results.

[0512] The matrix metalloproteinases (MMPs) comprise of a family of greater than 23 zinc-dependent enzymes that are end stage effector molecules involved in the degradation of extra cellular matrix components during morphogenesis and tissue remodeling. (Brinckerhoff et. al. Nat Rev Mol Cell Biol. 2002;3:207-214) Consistent with our data, previous studies in patients with IBD have shown a marked increase in expression of MMP3 in the inflamed biopsies when compared to non inflamed biopsies and control biopsies. (Heuschkel et. al. Gut. 2000;47:57-62; von LBet. al. Gut. 2000;47:63-73) Data for MMP3−/− mice have also demonstrated delayed clearance of bacteria, a compensatory increase in MMP7 and reduced CD4⁺ T lymphocyte recruitment to the lamina propria. (Li et. al. J Immunol. 2004;173:5171-5179) Furthermore, recent data have also shown a proinflammatory effect of MMP3 mediated through CXCL7 causing dose dependant neutrphil recruitment in colonic cell lines. (Kruidenier et. al. Gastroenterology. 2006;130:127-136)

[0513] In our data set we observed a decrease in MMP3 expression in our inflamed controls compared to our non-inflamed controls suggesting that the changes observed in MMP3 and MMP7 expression in UC may be disease specific. Transmission disequilibrium testing of the 5A variant of MMP3 in the German population showed an association with CD and not UC that was not replicated in the English population. (Pender et. al. J Med Genet. 2004;41:e112)

[0514] We have also used this dataset to analyse the relative expression of genes mapping to susceptibility loci implicated by genome wide analysis, notably within IBD2 and IBD5. The present data will be of use in gene identification, complementing results of fine-mapping studies, and genome-wide case-control studies currently underway. In this context it is of considerable interest to review our data concerning the IBD5 locus which spans a cytokine cluster containing a number of attractive candidate genes was initially discovered by genome wide scanning in 2000. (Rioux et. al. Am J Hum Genet. 2000;66:1863-1870; Ma et. al. Inflamm Bowel Dis. 1999;5:271-278) The tight linkage disequilibrium spanning the IBD5 linkage interval, has limited previous genetic studies, and these have not been sufficiently powered to identify the susceptibility gene within this region. (Waller, et. al. Gut. 2006;55:809-814; fisher et. al. Hum Mutat. 2006;27:778-785; Noble et. al. Gastroenterology. 2005;129:1854-1864)

[0515] Downregulation of the positional candidate gene encoding the organic cation transporter SLC22A5 (OCTN2) was observed when UC biopsies were compared to control biopsies and in both SLC22A4 (OCTN1) and SLC22A5 down regulation was observed in the inflamed UC sigmoid colon biopsies compared to non-inflamed sigmoid biopsies. These provocative data would suggest that decreased expression of these genes may after all be involved in the pathogenesis of UC, and these data thereby may sustain interest in these genes. Peltekova and colleagues suggested that two variants in these genes-SLC22A4 (1672CΔT) and the SLC22A5 variant (−207G→C) conferred disease susceptibility to CD, (Peltekova et. al. Nat Genet. 2004;36:471-475) however, when expression was compared in the small number of patients in this study who had been genotyped for these mutations no change in expression was observed between wild type and TC homozygote patients (data not shown). Expression of IRF-1 and PDLIM4, both plausible candidates within IBD5 was also dysregulated, emphasizing the uncertainties pertaining to this locus at present. Within the IBD2 locus, a series of dysregulated genes were identified in the present dataset, of which only GLI 1 has been subjected to detailed mutation analysis.

[0516] In conclusion these data have rigorously characterized expression of the whole genome in the terminal ileum and colon of patients which UC and controls. The studies provide new insights into regional variation of gene expression in the healthy colon, and also considerably extend previous studies in UC. These data identify a number of key regulators of intestinal inflammation, notably the alpha defensin family, hedgehog signaling molecules, and matrix metalloproteinases.

### Example 3

### Immunohistochemistry

[0517] DefA6 Expression in IBD Biopsies.

[0518] Defensin alpha 6 is normally expressed by Paneth cells in the small intestine crypt epithelium and not in colon epithelial cells. We had observed increased DefA6 expression at the RNA level in ulcerative colitis and Crohn's disease patients using Agilent microarray and in taqman on biopsy lysates. This experiment evaluated if increased DefA6 protein expression could be seen in formalin fixed colon biopsies.

[0519] Our studies show, as expected, that there was no DefA6 staining in colon biopsies from non-IBD control patients with no histologic evidence of inflammation. We also evaluated one non-IBD control patient with a diagnosis of microscopic colitis. In that patient, DefA6 was present in sigmoid colon crypt epithelial cells.

[0520] In ulcerative colitis patients, 21 patients had scattered or clustered DefA6 staining in crypt epithelial cells of the sigmoid colon, descending colon, transverse colon, or rectum. Twenty of 21 positive patients had histologic evidence of chronic or chronic-active inflammation in their biopsy tissue. The remaining patient had predominantly acute (neutrophilic) inflammation. No patients with positive DefA6 staining in the colon had uninflamed biopsies.

[0521] There were 18 ulcerative colitis patients with no evidence of DefA6 staining in colon epithelium. The majority of these patients (10) had no histologic evidence of inflammation in the biopsy tissue. Six of the remaining patients had predominantly neutrophilic inflammation (acute inflammation) and two had chronic/chronic-active inflammation.

[0522] In summary, DefA6 expression in ulcerative colitis appears to correlated with the local inflammation status observed in the biopsy. None of the uninflamed biopsies had DefA6 staining. In addition, patients with chronic or chronic-active inflammation were more likely to have positive DefA6 staining than patients with acute inflammation.

[0523] Experimental Design: The scoring of inflammation status was based on inflammatory cell type predominance: neutrophil predominance=acute inflammation; neutrophils and mononuclear inflammatory cells=chronic active; and predominantly mononuclear inflammatory cells=chronic.

[0524] Table 9 shows the histologic findings. The expression of DefA6 is shown as “+”, or “++” and the corresponding inflammation score is provided in some cases.

TABLE 9

| Patient | HP # | Tissue | DefA6 | Inflammation status |
|---|---|---|---|---|
| 115 | HP-19891 | sigmoid | + | microscopic colitis |
| 119 | HP-19893 | descending | − | |
| 122 | HP-19898 | sigmoid | − | |
| 124 | HP-19899 | sigmoid | − | |
| 125 | HP-19900 | sigmoid | NA | this is a section of |
| | | | | terminal ileum |
| 125 | HP-19901 | sigmoid | − | |
| 130 | HP-19905 | rectum | − | |
| 131 | HP-19906 | sigmoid | − | |
| 135 | HP-19908 | sigmoid | − | |
| 136 | HP-19909 | sigmoid | − | |
| 222 | HP-19912 | rectum | + | chronic active |
| 223 | HP-19914 | sigmoid | + | chronic |
| 224 | HP-19916 | sigmoid | + | minimal chronic active |
| 225 | HP-19919 | sigmoid | − | no inflammation |
| 226 | HP-19920 | descending | − | no inflammation |
| 227 | HP-19922 | sigmoid | + | minimal chronic active |
| 230 | HP-19924 | sigmoid | − | no inflammation |
| 230 | HP-19925 | rectum | − | no inflammation |
| 231 | HP-19926 | descending | − | acute inflammation |
| 233 | HP-19927 | sigmoid | − | no inflammation |
| 234 | HP-19928 | descending | − | minimal chronic active HP |
| 235 | HP-19929 | rectum | − | acute inflammation |
| 238 | HP-19930 | sigmoid | + | chronic active |
| 239 | HP-19932 | rectum | + | minimal chronic |
| 240 | HP-19933 | rectum | − | minimal acute |
| 241 | HP-19934 | rectum | − | no inflammation |
| 244 | HP-19935 | sigmoid | − | no inflammation |
| 246 | HP-19936 | sigmoid | + | minimal chronic |
| 247 | HP-19937 | rectum | + | minimal chronic |
| 248 | HP-19938 | rectum | + | minimal chronic |
| 249 | HP-19939 | rectum | + | chronic active |
| 250 | HP-19940 | sigmoid | + | chronic active |
| 251 | HP-19941 | rectum | + | chronic active |
| 253 | HP-19942 | sigmoid | + | chronic active |
| 255 | HP-19943 | sigmoid | NA | fragmented section |
| 256 | HP-19944 | sigmoid | + | chronic active |
| 257 | HP-19947 | rectum | ++ | chronic active |
| 258 | HP-19948 | rectum | + | chronic |
| 259 | HP-19949 | sigmoid | ++ | chronic active |
| 260 | HP-19950 | sigmoid | + | chronic active |
| 261 | HP-19951 | sigmoid | − | mild acute |
| 262 | HP-19952 | sigmoid | − | acute inflammation |
| 262 | HP-19953 | rectum | − | no inflammation |
| 263 | HP-19954 | rectum | − | no inflammation |
| 265 | HP-19955 | sigmoid | + | chronic active |
| 266 | HP-19956 | rectum | + | acute inflammation |
| 267 | HP-19957 | transverse | ++ | Chronic active |
| 270 | HP-19958 | rectum | − | Chronic active |
| 245 | HP-19965 | sigmoid | − | no inflammation |
| 245 | HP-19966 | rectum | − | acute inflammation |

### Example 4

### Analysis of Germline GLI1 Variation

[0525] Ulcerative colitis (UC) and Crohn's disease (CD) are polygenic chronic inflammatory bowel diseases (IBD) of high prevalence that are associated with considerable morbidity. The hedgehog (HH) signalling pathway plays vital roles in gastrointestinal tract development, homeostasis and malignancy. We identified a germline variation in GLI1 (within the IBD2 linkage region, 12q13) in patients with IBD. Since this IBD-associated variant encodes a GLI1 protein with reduced function, we tested whether mice with reduced Gli1 activity are susceptible to chemically induced colitis. Using a gene-wide haplotype-tagging approach, germline GLI1 variation was examined in three independent populations of IBD patients and healthy controls from Northern Europe (Scotland, England and Sweden) totalling over 5000 individuals. On log-likelihood analysis, GLI1 was associated with IBD, predominantly UC, in Scotland and England (p<0.0001). A non-synonymous SNP (rs2228226C→G), in exon 12 of GLI1 (Q1100E) was strongly implicated, with pooled odds ratio of 1.194 (C.I.=1.09−1.31, p=0.0002). GLI1 variants were tested in vitro for transcriptional activity in luciferase assays. Q1100E falls within a conserved motif near the C-terminus of GLI1; the variant GLI protein exhibited reduced transactivation function in vitro. In complementary expression studies, we noted the colonic HH response, including GLI1, PTCH and HHIP, to be down-regulated in patients with UC. Finally, Gli1±mice were tested for susceptibility to DSS-induced colitis. Clinical response, histology and expression of inflammatory cytokines were recorded. Gli1±mice rapidly developed severe intestinal inflammation, with considerable morbidity and mortality compared with wild-type. Local myeloid cells were shown to be direct targets of HH signals and cytokine expression studies revealed robust up-regulation of IL-12, IL-17 and IL-23 in this model. HH signalling through GLI1 is required for proper modulation of the intestinal response to acute inflammatory challenge. Reduced GLI1 function predisposes to IBD pathogenesis, suggesting novel therapeutic avenues.

[0526] Ulcerative colitis (UC; MIM 191390) and Crohn's disease (CD; MIM 266600) are chronic, relapsing, inflammatory bowel diseases (IBD) of high prevalence (200-400 cases per 100,000 in N Europe and N America [Loftus E V, Jr. (2004) Gastroenterology 126: 1504-1517]) and are associated with considerable morbidity. Precise aetio-pathogenetic mechanisms are not understood but several lines of evidence implicate the central importance of a dysregulated host response to intestinal bacteria [Xavier R J, Podolsky D K (2007) Nature 448: 427-434]. Epidemiological data, detailed molecular studies, and recent genome-wide association studies strongly suggest that UC and CD are related polygenic diseases that share some susceptibility loci (IL-23R, IL-12B, and NKX2.3 [Wellcome Trust Case Control Consortium (2007) Nature 447: 661-678; Duerr et al. (2006) Science 314: 1461-1463; Parkes et al. (2007) Nat Genet July;39(7):830-2. Epub Jun. 6, 2007]), but differ at others: NOD2, ATG16L1 and IRGM are specific CD genes; the ECM1 locus is associated with UC [Parkes et al. (2007) Nat Genet July;39(7):830-2. Epub Jun. 6, 2007; Fisher et al. (2008). Nat Genet 40(6):710-2. Epub Apr. 27, 2008; Hampe et al. (2007) Nat Genet 39: 207-211; Hugot et al. (2001). Nature 411: 599-603; Ogura Y et al. (2001). Nature 411: 603-606]. The IBD2 locus (OMIM 601458) on chromosome 12q13 was first identified in a UK genome-wide scan (peak LOD score 5.47 at D12S83) [Satsangi et al. (1996). Nat Genet 14: 199-202] involving both UC and CD patients. Hater studies showed that IBD2 contributes significantly to UC, notably extensive disease, but perhaps in a more minor way to CD susceptibility [Achkar et al. (2006). Am J Gastroenterol 101: 572-580; Parkes M et al. (2000) Am J Hum Genet 67: 1605-1610]. A strong candidate gene that maps to the IBD2 locus is GLI1, one of three related GLI transcription factors that transduce secreted hedgehog (HH) signals. HH signalling is key in gut development, homeostasis and malignancy, but has not been carefully studied in IBD [Lees et al. (2005) Gastroenterology 129: 1696-1710]. In developing intestine, Sonic (SHH) and Indian Hedgehog (IHH) provide a paracrine signal from epithelium to the mesenehymal receptor patched (PTCH). PTCH controls HH signal transduction through the membrane protein smoothened (SMO) and zinc finger transcription factors GLI1, GLI2, and GLI3 to direct tissue pattern and cell fate [Madison et al. (2005) Development 132: 279-289]. Chronic injury, inflammation and repair are critical aspects of IBD, and thus it is pertinent that the HH pathway is centrally involved in these processes in several other tissues, including muscle [Pola et al. (2003) Circulation 108: 479-485], liver [Jung et al. (2008) Gastroenterology 134: 1532-1543; Omenetti et al. (2008) Gut May;134(5):1532-43. Epub Feb. 14, 2008], and lung [Stewart et al. (2003) J Pathol 199: 488-495; Watkins et al. (2003) Nature 422: 313-317]. Indeed, HH signalling may play a central role in the inflammatory response since SHH is critical for T lymphocyte development [El Andaloussi et al. (2006). Nat Immunol 7: 418-426], adult human CD4+ T cell activation [Lowrey et al. (2002) J Immunol 169: 1869-1875; Stewart et al. (2002). J Immunol 169: 5451-5457], and myeloid cell maturation in the spleen [Varas et al., (2008) J Leukoc Biol June;83(6):1476-83. Epub Mar. 11, 2008]. Dysregulation of components of the HH pathway has also been noted in inflammatory diseases of the gut, including Barrett's esophagus, chronic gastritis and IBD [Nielsen et al., (2004) Lab Invest 84: 1631-1642]. Using microarray gene expression analyses of colonoscopic biopsies, we recently demonstrated that GLI1 is downregulated in the intestinal mucosa in inflamed UC compared with non-inflamed samples [Noble et al. (2008) Gut. October;57(10):1398-405. Epub Jun. 3, 2008]. To further explore the possible association between GLI1 and IBD susceptibility, we examined haplotype variation at the GLI1 locus in several Northern European populations using a gene-wide haplotype-tagging approach. We identified a significant association with IBD strongly implicating a non-synonymous SNP in the C-terminal region of GLI1. Functional analysis of the associated variant in vitro demonstrated a 50% reduction in GLl1 transcriptional activation, evidence that this may be a functional variant increasing disease risk. These findings together led us to hypothesize that a reduced dosage of functional GLI1 protein might play an important role in colonic inflammation. To test this directly, we challenged Gli1±mice and their wild type (WT) littermates with dextran sodium sulphate (DSS) to induce acute intestinal inflammation. Gli1±mice rapidly developed severe colitis, suggesting that functional Gli1 activity is crucial to response to inflammatory stimuli in mouse and man.

[0527] Subjects and Samples, Table 10 provides detailed demographics and phenotypic data on Scottish and Cambridge IBD population. (HC—healthy control; CD—Crohn's disease; UC—ulcerative colitis; IC—indeterminate colitis.

TABLE 10

| | Scottish Panel | Cambridge Panel |
|---|---|---|
| Total number | 2183 | 2337 |
| | (1374 HC; 474 UC; | (589 HC; 928 UC; |
| | 335 CD) | 737 CD; 83 IC) |
| Sex - % male | HC 48.7%; UC 52.0%; | HC 45.0%; UC 52.6%; |
| | CD 39.6% | CD 37.0% |
| Median age at diagnosis/ | HC 50.0 (43.0-55.0) | HC 60.0 (53.0-69.0) |
| recruitment - years (IQR) | UC 34.1 (25.2-49.9) | UC 36.7 (26.84-50.35) |
| | CD 27.8 (20.8-41.1) | CD 26.1 (20.3-37.2) |
| CD location | | |
| Terminal ileum (L1) | 38.4% | 31.8% |
| Colon (L2) | 36.5% | 36.5% |
| Ileocolon (L3) | 25.1% | 31.7% |
| UC location | | |
| Proctitis (E1) | 17.3% | 14.8% |
| Left-sided colitis (E2) | 40.5% | 34.1% |
| Extensive colitis (E3) | 42.2% | 51.1% |
| CD 5 year behaviour | | |
| Inflammatory (B1) | 64.8% | 52.3% |
| Stricturing (B2) | 14.8% | 35.2% |
| Penetrating (B3) | 20.3% | 12.5% |
| Perianal involvement (p) | 17.4% | 24.4% |
| Surgery CD | CD 59.3% | CD 52.0% |
| | UC 18.5% | UC 11.8% |
| Smoking at diagnosis of | YES 40.7% | YES 41.8% |
| CD | NO 47.4% | NO 45.0% |
| | EX 11.9% | EX 13.2% |
| Smoking at diagnosis of | YES 19.0% | YES 12.1% |
| UC | NO 49.5% | |
| | EX 31.5% | |

[0528] Genotyping. Scotland and Sweden: Genomic DNA was extracted from blood samples using a modified salting-out technique as previously described, and Nucleon kits. Genotypes were derived using the Taqman system for allelic discrimination; the assays were available from Applied Biosystems as Taqman SNP Genotyping Assays (7900HT sequence detection system; Applied Biosystems), except for SNPs rs10783819, rs3809114, rs507562, rs542278, rs730560, rs1669296, rs775322 which were genotyped on the Illumina platform. The accuracy of each Taqman assay was checked by repeat analysis in 5% of cases, with 100% concordance. Genotype distributions in control populations were consistent with Hardy-Weinberg Equilibrium (p>0.01) for all SNPs. Genotypes, in cases for the four tSNPs that could not be derived by Taqman were obtained by direct sequencing. Cambridge: DNA was extracted using Nucleon kits. Genotyping of CD cases and controls was performed using the Taqman biallelic discrimination system using an ABI 7900HT analyser (Applied Biosystems). Genotyping of UC cases was performed using a 1536 SNP Golden Gate bead array (Illumina). Concordance between platforms was assessed by genotyping 92 UC cases for SNPs rs2228224 and rs2228226 with concordance rates of 100% and 97.9% respectively and no evidence of systematic bias between platforms. Genotype distributions in case and control populations were consistent with Hardy-Weinberg Equilibrium (p>0.01) for all SNPs.

[0529] Gene expression by microarray and QPCR. The cohort of patients used in the microarray studies consisted of 67 patients with UC, 53 with CD and 31 healthy controls (HC). For demographics, generation of microarray dataset and QPCR methodology [see Noble et al. (2008) Gut. October;57(10):1398-405. Epub Jun. 3, 2008].

[0530] Induction of DSS-induced colitis and histological analysis. Groups of two to four wild type Gli1+/lacZ or wild type littermate controls in mixed cages (on a C57BL/6 background) were administered 3% DSS in drinking water for 4-6 days. The amount of DSS consumed was not significantly different between WT and Gli1±animals (data not shown). Gli1±animals tended to weigh more than their WT littermates (mean=28 g for Gli1±animals and 24 g for WT animals). Therefore, DSS-treated weight matched WT C57BL/6 animals (n=4) were also tested along with Gli1±animals and WT littermates. No differences were evident between WT littermates and weight matched C57BL/6. All animals were monitored daily for diarrhoea, bloody stool, and weight loss. Clinical scoring was as follows: 0=no symptoms, 1=diarrhoea, 2=bloody stool, 4=severe rectal bleeding and morbidity to the point of immobility/death. For histology, a segment of large intestine tissue of equal length and location for all animals was fixed overnight in 4% paraformaldehyde, dehydrated, infiltrated with paraffin, and sectioned at 5 μm. Slides were stained with hematoxylin/eosin and scored histologically by a gastrointestinal pathologist (HA) blinded to the source of the tissue.

[0531] Protein Mutagenesis and Luciferase Assay GLI1 E1100 was amplified from Image Clone #3531657, and cloned into pCMVTag2b. GLI1 Q1100 was obtained by inducing a point mutation using the QuikChange II Site-Directed Mutagenesis Kit (Stratagene) following the manufacturer's protocol. Plasmids encoding 8×Gli-Luciferase, m8× Gli-Luciferase (mutated Gli sites) and Gli2AN were gifts of Dr. Andrzej Dlugosz. 293T cells were plated in 12 well plates, transfected with 0.7 μg/well transcription factor, 0.4 μg/well reporter plasmid, and 2 ng/well pRL-TK Renilla (Promega) and analyzed for luciferase expression 36 hours after transfection using the Dual-Luciferase Reporter Kit (Promega) following the manufacturer's protocol. Firefly luciferase expression was normalized by well to Renilla, and fold changes were calculated by comparing to 8×Gli-Luciferase transfected alone.

[0532] Cytokine Expression QPCR Whole colonic mRNA was collected using Trizol, followed by RNA clean-up with DNase digestion using the RNeasy Mini Kit (Qiagen). cDNA was synthesized using the iScript cDNA synthesis kit (Biorad), and SybrGreen QPCR was performed on a Biorad iCycler machine. Expression levels were normalized to GAPDH, and statistical analysis was performed using the Student's T-test.

[0533] Statistical analysis. Haplotype frequencies of the tSNPs were inferred using the expectation-maximization algorithm and these used to test whether haplotype frequencies were different in cases and controls as implemented in the EH and PM programmes. The test statistic 2*(In(Lease)+In(Lcontrol)−In(Lease/Lcontrol)), which has a χ² distribution with n−1 degrees of freedom (where n=number of possible haplotypes) was calculated and empirical p values obtained by permuting the data 10,000 times. Haplotypes were examined using the Haploview programme v3.2 (www.hapmap.org). Individual SNP analysis was performed using χ² or Fisher's exact test, where appropriate, with twotailed p-values given and odds ratios (OR) presented with 95% confidence intervals (C.I.). The meta-analysis of SNP rs2228226 was performed using the Mantel-Haenszel method using a fixed effects model (R-software package). Details for calculation of false positive report probability are provided in supplementary methods. Expression profiles were analysed using Mann-Whitney U test and Kruskal-Wallis test, assuming a non-parametric distribution of all datasets (GraphPad Prism 4, GraphPad Software Inc.).

[0534] Results

[0535] Gene-wide variation in GLI1 is associated with IBD and attributable to a nonsynonymous SNP (rs2228226) in the Scottish population

[0536] Four multi-marker tagging single nucleotide polymorphisms (tSNPs; r²≧0.8) were identified (rs3817474, rs2228225, rs2228224, and rs2228226) to describe haplotypic variation of GLI1, detecting haplotypes of a frequency >1%. We genotyped these 4 tSNPs in a Scottish IBD population consisting of 474 UC and 335 CD cases, and 1364 well-matched healthy controls (Table 10). We then used a model-free analysis [Zhao et al. (2000) Hum Hered 50: 133-139] to test the association of GLI1 and IBD susceptibility. In the Scottish population, we demonstrate a highly significant association in IBD (p<0.0001) and UC (p<0.0001), and an association with CD of borderline significance (p=0.03). On analysis of individual estimated haplotype frequencies in Haploview, 3 common haplotypes were described (DATA NOT SHOWN). We confirmed that this effect was confined to the GLI1 gene by genotyping an additional 7 haplotypetagging SNPs, chosen from Phase II HapMap data, to tag neighbouring blocks, in 166 CD and 170 UC patients. This confirmed the presence of a GLI1 spanning haplotype block that did not extend into neighbouring genes (INHBE and ARHGAP9) (DATA NOT SHOWN).

[0537] Table 11 shows minor allelic frequencies for GLI1 non-synonymous SNP rs2228226 (tSNP4) in Scottish, English, and Swedish healthy controls (HC), inflammatory bowel disease (IBD), Crohn's disease (CD) and ulcerative colitis (UC).

TABLE 11

| | | | IBD | | | UC | | | CD | | |
|---|---|---|---|---|---|---|---|---|---|---|---|
| | HC | | | | p value | | | p value | | | p value |
| | N | % | N | % | OR (C.I.) | N | % | OR (C.I.) | N | % | OR (C.I.) |
| Scotland | 1374 | 30.3 | 884 | 34.8 | 0.0026 | 474 | 33.9 | 0.042 | 335 | 36.1 | 0.0053 |
| | | | | | 1.23 | | | 1.19 | | | 1.30 |
| | | | | | (1.07-1.40) | | | (1.01-1.39) | | | (1.08-1.55) |
| Cambridge | 589 | 26.4 | 1737 | 29.6 | 0.042 | 928 | 30.8 | 0.017 | 737 | 27.9 | 0.40 |
| | | | | | 1.17 | | | 1.21 | | | 1.08 |
| | | | | | (1.0-136) | | | (1.03-1.42) | | | (0.90-1.28) |
| Sweden | 281 | 30.6 | 493 | 35 | 0.27 | 288 | 34.4 | 0.43 | 205 | 35.9 | 0.24 |
| | | | | | 1.14 | | | 1.11 | | | 1.19 |
| | | | | | (0.90-1.45) | | | (0.90-1.45) | | | (0.90-1.58) |

[0538] Odds ratios and two-tailed p-values are given for χ² analysis of IBD vs. HC, UC vs. HC and CD vs. HC in each of these three populations. Meta-analysis of these data are presented in FIG. 1. Frequencies of estimated haplotypes in all three populations and the full genotype data for the Scottish population are detailed in supplementary materials (Supplemental Tables 1 and 2).

[0539] The association on haplotype testing and log-likelihood analysis was largely attributable to a non-synonymous SNP in exon 12 of GLI1 (rs2228226C→G; tSNP4). rs2228226 was associated with IBD (allelic frequency OR=1.23. C.I. 1.07-1.40, p=0.0026: homozygotes OR=1.56, C.I. 1.15-2.11, p=0.0047), CD (allelic frequency OR=1.30. C.I. 1.08-1.55, p=0.0053, homozygotes OR=1.79, C.I. 1.21-2.65. p=0.0048) and UC (allelic frequency OR=1.19, C.I. 1.01-1.39, p=0.04) (Table 11 and DATA NOT SHOWN). These data suggest an allele specific dose response with a greater odds ratio for homozygotes than heterozygote patients. Mutation screening of the GLI1 coding regions by direct sequencing failed to identify any novel SNPs. There was no association between 7 additional GLI1 variants from dbSNP and IBD (DATA NOT SHOWN).

[0540] Replication of GLI1 association in two independent North European IBD cohorts and meta-analysis. We then sought to replicate these findings in other populations. In a large IBD panel from Cambridge, England (n=928 UC, 737 CD, 83 indeterminate colitis and 589 HC) association with GLI1 was replicated by log-likelihood analysis in IBD (p=0.009) and UC (p<0.0001). rs2228226 was associated with IBD (OR 1.17, C.I. 1.00-1.36, p=0.042) and UC (OR 1.21, C.I. 1.03-1.42, p=0.017) but not CD in this population (Table 11). As in Scotland, there was no association with tSNPs1-3 (DATA NOT SHOWN). In the smaller Swedish cohort (n=770), there was a non-significant trend to association of rs2228226 with IBD (OR 1.14, C.I. 0.90-1.45) (Table 11).

[0541] FIG. 104 shows a meta-analysis, using the Mantel-Haenszel method with a fixed effects model on the IBD cases and healthy controls in Scotland, England and Sweden confirmed the association with rs2228226 (OR 1.194, C.I. 1.089-1.309, p=0.0002). The meta-analysis is of non-synonymous GLI1 SNP rs2228226 (tSNP4) in Scotland, Cambridge and Sweden using Mantel-Haenszel method (n=5352 individuals). There was no evidence of heterogeneity in the contribution of rs2228226 between the 3 cohorts (p=0.825). Recognising the current problem with the publication of false positive findings in genetic association studies we estimated the probability that the association with disease risk found in the meta-analysis of GLI1 SNP rs2228226 represents a true (rather than false positive) association by adopting the false positive report probability (FPRP) approach described by Waeholder et al. (2004) J Natl Cancer Inst 96: 434-442. This gives an estimated probability that these findings represent a true finding of at least 92% (FPRF<0.08). This method is designed to avoid overinterpretation of statistically significant findings that are not likely to signify a true positive but in our study gives clear support to our interpretation of these data.

[0542] The GLI1 variant encoded by rs2228226 is functionally deficient in activating GLI-responsive transcription in vitro rs2228226C→G is a mis-sense mutation in exon 12 of GLI1, encoding a change from glutamine to glutamic acid (Q1100E).

[0543] FIG. 105 shows Q1100E disrupts a conserved region of the GLI1 protein and reduces GLI1 transcriptional activity. A) Conservation of known functional domains in the Gli1 protein. Previously described Sufu binding, DNA binding, and transactivation domains [Yoon el al. (1998) J Biol Chem 273: 3496-3501; 27 Kinzler et al. (1988) Nature 332:371-374; Kogerman et al. (1999) Nat Cell Biol 1: 312-319] are shown schematically. Amino acid conservation of each domain is represented numerically and by shading of the bar below the domain. Red boxes indicate regions known to regulate GLI1 protein stability [Huntzicker et al. (2006) Genes Dev 20: 276-281]. The conserved C-terminal domain that includes Q1100H is adjacent to a known transactivation domain. B) Alignment of the C-terminus of mammalian Gli1 proteins. This region (AA 1080-1106) is highly conserved in mammalian lineages. C, D) GLI1 Q1100 and E1100 have similar cellular localization in 293T cells. E) GLI1 E1100 is deficient in driving activation of the 8×Gli-Luciferase reporter compared to GLI1 Q1100. Gli2ΔN is a strong activator of 8×Gli-Luciferase and serves as a positive control for GLI1 activation. The m8×Gli-Luciferase construct contains only mutant Gli binding sites and serves as a negative control. Data shown from 6 triplicate experiments done using two different plasmid preparations (N=18).

[0544] The mutation fells within a well conserved motif at the C-terminus of mammalian GLI1 proteins, near a recognized transactivation domain (FIG. 105a) [Yoon et al. (1998) J Biol Chem 273: 3496-3501]. The Q1100 residue is itself 100% conserved in all mammals examined (FIG. 105b). In order to evaluate the functional consequences of the Q1100E mutation, we transfected either GLI1 Q1100 or the variant GLI1 E1100 into 293T cells. No differences in level of expression or cellular localization were detected between these GLI1 variants; both proteins were readily detectable in the nucleus of transfected cells (FIGS. 105c-d). We further evaluated the ability of each variant to activate the well-characterized GLI reporter 8×Gli-Luciferase [Saitsu et al. (2005) Dev Dyn 232: 282-292]. We utilized GliΔ2N, a very strong activator of 8×Gli-Luciferase, as a positive control for GLI1 transcriptional activity [Roessler et al. (2005) Hum Mol Genet 14: 2181-2188], While both GLI1 variants activated 8×Gli-Luciferase above baseline, WT GLI1 Q1100 was two-fold more efficient as a transcriptional activator than the variant GLI1 E1100 (FIG. 105e).

[0545] Hedgehog pathway activity is dysregulated in colonic inflammation. We have previously reported that GLI1 expression is greater in the distal compared with the proximal colon in man [Noble et al. (2008) Gut. October;57(10):1398-405. Epub Jun. 3, 2008[.

[0546] FIG. 106 shows expression of hedgehog (HH) signalling components in the healthy human adult colon (HC) and ulcerative colitis (UC). A) Patched (PTCH), Hedgehog-interacting protein (HHIP), and GLI1 mRNA levels increase along the length of the healthy adult colon, from ascending colon (AC) to descending colon (DC) and sigmoid colon (SC). B) HH protein expression in terminally differentiated enterocytes at the luminal surface, is greater in the distal colon compared with the proximal. C) Quantitative analysis of mRNA levels of Indian hedgehog (IHH), PTCH, GLI1, and HHIP in UC compared with non-inflamed HC. To account for the gradients identified along the length of the healthy colon (a-b), the data from SC only are shown. QPCR data is presented for IHH as this gene was not present on the Agilent microarray chip. Disease specimens are sub-categorised into non-inflamed (N−1) and inflamed (I) tissues. There was no change in levels of DHH, PTCH2, GLI2, GLI3, SUFU or DISP1 in either UC or CD compared with HC, or in non-IBD inflammation (data not shown). Analysis of SHH mRNA demonstrated a mild increase in expression levels related to inflammation that is consistent with the known expression of SHH in inflammatory cells (data not shown) [Lowrey et al. (2002) J Immunol 169: 1869-1875].

[0547] Individual data points are plotted with horizontal lines representing the medians for each dataset. P-values presented are derived from Kruskal-Wallis test, comparing levels in AC, DC and SC, and from Mann-Whitney U-tests (UC vs. HC (N−I)).

[0548] Extended in silico analysis of this microarray dataset now demonstrates that mRNA transcripts of PTCH and HHIP, along with HH protein, mirror this expression gradient (FIGS. 106a-b). GLI1, PTCH and HHIP are pathway response elements whose expression levels predict pathway activity. GLI1 (p=0.0003), PTCH (p=0.002), and HHIP (p=0.0003) were lower in inflamed UC compared with HC from equivalent location (FIG. 106c). IHH was lower in UC regardless of inflammation (p=0.02). GLI1 expression was lower in CD than HC (p=0.004) irrespective of inflammatory status (DATA NOT SHOWN), a noteworthy finding given that GLI1 variation was also associated with CD in Scotland. PTCH was lower in inflamed CD compared with non-inflamed CD and HC (p=0.007). GLI1 and PTCH were both lower in non-IBD inflammation versus HC (DATA NOT SHOWN). These data demonstrate overall down-regulation of HH pathway activity, including GLI1, PTCH, and HHIP, in areas of colonic inflammation.

[0549] Gli1±animals exhibit mortality and heightened morbidity in response to intestinal inflammation induced by 3% DSS treatment. In vitro analysis of the GLI1 1100E variant demonstrated a 50% deficiency in transactivation function compared to WT GLI1, and our genetic analysis demonstrates an allele-specific dosage response, suggesting that a moderate reduction in GLI1 function was sufficient to predispose to intestinal inflammatory disease. To specifically test this hypothesis, we treated Gli1±mice [Park et al. (2000) Development 127: 1593-1605], and their WT littermates with 3% DSS for 6 days to induce acute intestinal inflammation. Gli1±animals were rapidly and severely affected by DSS treatment.

[0550] FIG. 107 shows the results in which Gli1±animals show mortality, severe clinical symptoms, and profound weight loss after DSS treatment. A) WT animals are 100% viable over the 6 day treatment period (N=14). Nearly 50% of Gli1±animals (4/9) die in response to 3% DSS treatment for 6 days. B) Gli1±animals display markedly more severe symptoms than WT animals after 4 or 6 days of 3% DSS treatment. 1=diarrhoea, 2=bloody diarrhoea, 4=severe bleeding/death. Each dot represents an individual animal and the solid line shows the mean observation in each cohort. C) Gli1±animals (N=9) have lose weight more rapidly than their WT littermates (N=10). *=p<0.05

[0551] After 6 days, 4/9 had died, and 3 of the survivors demonstrated severe morbidity, with significant rectal bleeding and almost complete immobility (FIG. 107a). In contrast, no WT animals (N=14) died, all were mobile and showed less morbidity on days 5 and 6 after treatment. Gli1±animals developed bloody diarrhoea and significant weight loss by day 4, whereas WT animals did not develop clinical signs or measurable weight loss until day 6 (FIGS. 107b-c).

[0552] Gli1±animals develop more severe colonic pathology than WT littermates in response to DSS treatment. We examined colonic tissue from Gli1±and WT animals taken after 4 and 6 days of DSS treatment. Gli1±animals developed severe tissue lesions more rapidly than WT.

[0553] FIG. 108 shows Gli1±animals demonstrate more severe intestinal inflammation than WT littermates in response to DSS treatment. A) WT animals (N=32 =b 4=l ) exhibit mild colonic inflammation but do not develop substantial epithelial or ulcerative inflammatory pathology within =b 4 =l days of DSS treatment. B) Gli=b 1=l =35 animals (N==b 4=l ) develop significant inflammatory infiltration, epithelial damage, and ulceration within 4 =days of DSS treatment. C-D) Gli=1=±animals develop profound intestinal inflammation in response to =b 3=l % DSS treatment, with severe epithelial damage in long stretches of their colonic mucosa (N=32 =b 9=). E) Blinded histological scoring of colonic damage after 6 =days of DSS treatment. Standard lengths of tissue from the mid colon and distal descending colon were scored in each animal. Gli=b 1=l =35 animals (N=32 =b 6=l ) have more overall inflammatory foci and more long foci (=b 10=l + crypt units affected) than WT animals (N=32 =b 6=l ). Each dot represents the number of observed foci in an individual animal; the solid line shows the mean observation in each cohort. Red dots indicate the animals that were analyzed for cytokine expression. F) Resident mucosal myeloid cells respond directly to Hh signalling and express LacZ in the homeostatic colon of Gli1==35 animals. Arrows indicate cells with LacZ-positive nuclei and Cd=b 11=l b membranes.

[0554] After 4 =days, WT colons showed evidence of inflammatory change but with few destructive lesions FIG. 108=i a=l ), while extensive inflammatory infiltration and destructive colonic ulcers were prominent in Gli=b 1=l =35 mice (FIG. 108=i b=l ). After 6 =days, inflammation in surviving Gli=b 1=l ±animals was markedly more severe. The number (FIG. 108=i e=l ), size and invasiveness of inflammatory lesions (FIGS. 108=i c=l -=i e=l ) were significantly greater in Gli=b 1=l ±animals. Taken together, these results demonstrate that the loss of a single Gli=b 1 =l allele leads to increased sensitivity to DSS treatment as reflected by severe intestinal inflammatory pathology and obvious clinical signs.

[0555] Intestinal myeloid cells respond directly to HH signals. We have demonstrated that HH signalling is exclusively paracrine in murine intestine and colon [Madison et al. (2005) Development =b 132: 279=l -=b 28914=l =9 . Here we confirm that Gli=b 1 =l is expressed in inflammatory cells in mouse, utilizing Gli1==30 /lacZ animals, which allow Hh-responsive cells to be easily visualized [Park et al. (2000) Development =b 127: 1593=l -=b 1605=l =9 . In resting adult colon, lamina propria resident CD=b 11=l b-positive myeloid cells express LacZ and are therefore responding directly to Hh signals (FIG. 108=i e=l ).

[0556] Gli=b 1=±animals have increased IL-23=p=19 =and pro-inflammatory cytokine expression.

[0557] FIG. 109 shows cytokine analysis of Gli=b 1=l ±=0 and WT mice after DSS treatments demonstrates robust pro-inflammatory cytokine activation. A) Cytokine expression in WT and Gli=b 1=l ±animals (N=32 =4=) after 6 =days of =3=% DSS treatment. Cytokine expression normalized to GAPDH is plotted on the Y-axis for Gli=b 1=l ±mice, and on the X-axis for WT animals. Gene expression levels that are changed in a statistically significant manner are shown with stars. The dotted diagonal trendline indicates identical expression levels between WT and Gli=b 1=l =35 mice. B) Table showing the average cytokine expression, standard deviation, and fold change in Gli=b 1=35 animals compared to WT controls (*=32 p<=b 0.05=l ). Several pro-inflammatory cytokines are upregulated in Gli=b 1=l ±animals, but anti-inflammatory cytokines are largely unchanged.

[0558] QPCR examination of cytokine expression on whole colonic tissue taken after 6 =days of DSS confirms the histological and clinical data; Gli=b 1=l ±animals demonstrate very significant inflammation compared to WT (FIG. 109). We detect robust expression of TH=b 1 =l cytokines, including IFN=65 , in Gli1==35 animals, not surprising given the severity of the inflammation in these animals and the prominence of TH1 =cells in DSS-induced colitis. We did not detect a significant difference in TGF=62 =0 and IL-10 =between Gli=1==35 A and WT animals, suggesting that down-regulation of anti-inflammatory cytokines was not the primary mechanism of increased inflammation in this model. The most highly expressed cytokine in Gli=b 1=l ±animals was IL-=b 23=l p=b 19=l , which is known to drive differentiation of TH=b 17 =l lymphocytes, key mediators of inflammation in several systems, including IBD [Hue et al. (2006) J Exp Med =b 203: 2473=l -=b 2483; =l Yen et al. (2006) J Clin Invest =b 116: 1310=l -=b 1316]=l . IL-=b 12 =l and IL-=b 17, =l cytokines closely associated with IL-=b 23, =l were also upregulated in Gli=b 1=l ±animals. These data are particularly significant since the IL-=b 23 =l pathway has recently been strongly implicated in IBD pathogenesis both in humans [Duerr et al. (2006) Science =b 314: 1461=l -=b 1463]=l and mice [Yen et al. (2006) J Clin Invest =b 116: 1310=l -=b 1316]=l . Our data provide a potential link between this key inflammatory pathway and the robust inflammation seen with reduced GLI=b 1 =l dosage or function.

[0559] Discussion

[0560] The data presented here provide the first evidence that intact HH signalling is critical in the mammalian gut response to inflammatory challenge, and that reduced GLI=b 1 =l function is implicated in IBD pathogenesis. We confirm that the HH signaling pathway is downregulated in colonic inflammation in man. We identify a specific GLI=b 1 =l variant that is highly associated with UC/IBD, and demonstrate that the variant protein is functionally deficient as a transcriptional activator in vitro. Finally, we demonstrate that a =b 50=l % reduction in murine Gli=b 1 =l results in a heightened intestinal inflammatory response to DSS with significant upregulation of the IL-=b 23 =l pathway. Not only do these findings have clear implications for the understanding of IBD pathogenesis with potential for therapeutic intervention, they are the first clear description of a functional role for HH signalling and GLI1 =in bowel inflammation. The inherited variation in the GLI=b 1 =l gene that we have detected is associated with IBD and UC, in both Scotland and England, with findings for rs=b 2228226 =l confirmed by meta-analysis of over =b 5000 =l individuals, with odds ratio of 1.19. =Evidence for an effect in CD is seen in the present study, but the predominant effect is clearly related to UC. The magnitude of this association is entirely in line with the effect size noted in a number of recent studies of complex disease genetics, including CD, colo-rectal cancer [Tenesa et al. (2008) Nat Genet =b 40: 631=l -=b 637]=l , and coeliac disease [Hunt et al. (2008) Nat Genet =b 40: 395=l -=b 402]=l . The level of significance attained satisfies suggested criteria of p<=b 10=hu =31 4=l -=b 10=hu =31 6 =l for gene-centric studies [Burton et al. (2007) Nat Genet =b 39: 1329=l -=b 1337; =l Thomas et al. (2004) J Natl Cancer Inst =b 96: 421=l -=b 423]=l . The three Northern European populations studied have previously demonstrated similar contribution of other IBD susceptibility genes/loci, including NOD2 and IBD5 [Gaya et al. (2006) Lancet =b 367: 1271=l -=b 1284]=l . Whilst the minor allelic frequencies for this SNP are very similar in Scotland and Sweden (=b 30.3=l % and =b 30.6=l %), they differ by =b 3.9=l % between Scotland and Cambridge (=b 30.3=l % and =b 26.4=l %). This difference is in keeping with that noted for a number of SNPs analysed for population stratification in the recent WTCCC study [Wellcome Trust Case Control Consortium (2007) Nature =b 447: 661=l -=b 678]=l . Whilst our resequencing efforts identify rs=b 2228226 =l as the only coding variant associated with IBD, the haplotype analysis and log-likelihood analyses raise the possibility that other germ-line variants may also contribute to IBD risk. These need be explored formally—specifically the role of intronic variants, long-range promoter effects and/or copy number variation. In this context, several complex disease genes, including NOD2 [Hugot et al. (2001). Nature =b 411: 599=l -=b 603; =l Ogura Y et al. (2001). Nature =b 411: 603=l -=b 606]=l , have multiple independent mutations conferring disease risk, some disease genes have no causative mutations within coding sequences (e.g. IRGM in CD [Parkes et al. Am J Hum Genet. =b 2000;67:1605=l -=b 16105]=l ), and synonymous SNPs may be associated with functional effects [Kimchi-Sarfaty et al. (2007) Science =b 315: 525=l -=b 528]=l . rs=b 2228226=l C→G encodes a change from glutamine to glutamic acid (Q=b 1100=l E). Our in vitro data demonstrates that GLI1 1100=E is a subfunctional transcriptional activator compared to WT GLI=b 1=l , though it is synthesized and localized appropriately. The Q=b 1100=l E mutation causes a significant charge change in a conserved region directly adjacent to the known transactivation region of GLI=b 1=l ; this change could directly modify transactivation activity, disrupt the structure of the transactivation domain, or affect protein stabilization [Huntzicker et al. (2006) Genes Dev =20: 276=-=b 281]= decreasing activity. Our data suggest that reductions in GLI=b 1 =activity or amount also produce a robust phenotype. Gli1==35 animals, which have only =b 50=l % of the WT level of Gli=b 1=l , develop severe inflammation rapidly in response to moderate stimuli. These data, to our knowledge the first description of a phenotype for reduced Gli=b 1 =l function [Park et al. (2000) Development 127: 1593-1605], demonstrate the key role that a full complement of Hh response plays in protection from inflammatory disease. In addition, our in vitro data demonstrates that GLI1 E1100 is capable of activating some Gli response, suggesting that under homeostatic conditions, GLI1 E1100 could perform adequately. Similar to the situation in Gli1±animals, however, under conditions of inflammatory stress, GLI1 E1100 can only function at 50% of the level of WT GLI1. Whether the predisposition to inflammation in these systems is a direct result of lowered HH signal transduction within inflammatory cells or reflects the effect of lower HH signals on stromal target cells that, in turn, release signals that impact the integrity of the epithelial layer is not yet clear. Addressing this question will be a key avenue of future investigation. We have shown that the HH pathway may directly modify the innate immune response through signalling to myeloid target cells. This finding is in accordance with recent data demonstrating a crucial role for Hh signalling in myeloid cell maturation in the spleen [Varas et al., (2008) J Leukoc Biol June;83(6):1476-83. Epub 2008 March 1123]. Interestingly, myeloid cell populations can differentially modify the intestinal inflammatory milieu through a significant impact on the IL-23/IL-17 pathway [Denning et al. (2007) Nat Immunol 8: 1086-1094]. Together, our findings demonstrating direct HH response by innate immune populations and increased IL-23 after DSS treatment in Gli1±animals suggest that HH signalling may normally promote a tolerogenic phenotype in mucosal myeloid cells; reduced HH signal transduction may instead trigger an inflammatory response in these cells.

[0561] In conclusion, we demonstrate here for the first time the altered expression of a developmental signalling pathway in IBD, opening up novel lines of investigation, furthermore, we show that these effects are in part genetically determined, with evidence implicating GLI1 as an IBD2 gene, and identification of a specific variant with reduced transcriptional activity. The functional relevance of Gli1 is demonstrated by the severe intestinal inflammation that develops in the face of a 50% reduction in Gli1 concentration in an established mouse model of colitis. Taken together, these data strongly argue for the importance of a robust HH pathway activation in the protective response of the intestinal mucosa to inflammatory stimuli. These findings have important implications for the pathogenesis of UC and potentially for other forms of chronic inflammation. [Lees et al. (2006) Gastroenterology 131: 1657-1658].

### Example 5

### IBD Gene Expression Profiles from Whole Blood Samples

[0562] Genome wide expression profiles from human endoscopic colonic biopsies have started to help dissect out the pathogenic inflammatory pathways at the cellular level in IBD (Noble CL et al. Gut. Jun. 3, 2008 [Epub ahead of print]). Whole blood genome wide expression profiles may complement conventional endoscopic techniques to help in the diagnosis of IBD-Crohn's disease (CD) and ulcerative colitis (UC). The aim of this study was to investigate whole blood gene expression profiles to try to differentiate patients with IBD-CD, UC, and controls (HC).

[0563] Patients. 21 UC, 19 CD, and 10 controls (HC) were studied. 2 of the UC patients were newly diagnosed, 15 had quiescent disease and 4 had active disease. In CD 1 new diagnosis, 11 quiescent disease and 7 active disease patients were investigated.

[0564] Methods. 41058 expression sequence tags (representing 33296 genes) were analyzed in 50 whole blood samples using the Agilent platform. Total RNA was extracted from the blood using the micro total RNA isolation from animal tissues protocol (Qiagen, Valencia, Calif.). A T7 RNA polymerase single round of linear amplification was carried out to incorporate Cyanine-3 and Cyanine-5 label into cRNA. The samples were hybridized for 18 hours at 60° C. with constant rotation. Microarrays were washed, dried and scanned on the Agilent scanner according to the manufacturer's protocol. Microarray image files were analysed using Agilent's Feature Extraction software version 7.5. The genes were normalized using the Stratagene Universal Human Reference.

[0565] Using clustering analysis with all the IBD and HC patients, and probes that had a > or < than 1.5 fold change in expression, HC patients were more prevalent on one side of the dendrogram 1/21 v 9/29 (p=0.02 OR 1.8) (data not shown). No difference was observed in the distribution of the CD and UC samples. When all of the IBD samples were compared to controls 493 sequences had a fold change of greater than 1.5 (1.7×10⁻⁴¹<p<0.01) and 595 sequences had a fold change of less than 1.5 (4.0×10⁻⁴⁰<p<0.01). When CD and UC were compared, 293 sequences had a fold change of greater than 1.5 (5.4×10⁻²⁷<p<0.01) and 301 sequences had a fold change of less than 1.5 (5.2×10⁻¹⁸<p<0.01).

[0566] By using a panel of 10 of the up regulated and down regulated genes sequences we were able to predict with a >90% sensitivity IBD samples from controls. Table 12 below lists 20 differentially regulated genes in IBD when compared to controls.

TABLE 12

| | | Fold | |
|---|---|---|---|
| Sequence Name | Sequence Code | Change | P-value |
| LOC342959 (AARDC5) | A_32_P30271 | 4.92527 | 8.62E−18 |
| A_24_P910246 (ATXN3L) | A_24_P910246 | 2.92405 | 1.41E−07 |
| LOC92552 (FSHR) | A_23_P361744 | 2.78494 | 4.12E−13 |
| PDGFRA | A_23_P332536 | 2.7178 | 0.00004 |
| TGFB3 | A_24_P373096 | 2.67234 | 5.89E−09 |
| KCTD8 | A_23_P94902 | 2.65574 | 0.00005 |
| TGM4 | A_23_P41241 | 2.64262 | 0.0005 |
| NYD-SP25 | A_24_P309216 | 2.62905 | 7.76E−15 |
| FLJ33651 | A_24_P306032 | 2.62873 | 0.0034 |
| EMX2OS | A_24_P892472 | 2.55683 | 0.00029 |
| WNT16 | A_23_P134601 | −2.96773 | 3.46E−10 |
| SPRED2 | A_24_P315535 | −2.97751 | 3.12E−16 |
| MGC50721 (C16orf65) | A_23_P412508 | −3.06148 | 0.0088 |
| C12orf2 | A_24_P78556 | −3.17916 | 0.0129 |
| MPDZ | A_23_P396328 | −3.19437 | 1.87E−40 |
| FARS2 | A_24_P456422 | −3.35391 | 0.00097 |
| CASP8 | A_24_P157087 | −3.41412 | 3.90E−09 |
| NT5E | A_24_P316430 | −3.63046 | 0 |
| TDGF3 | A_24_P179646 | −3.71928 | 7.31E−23 |
| BTNL3 | A_23_P158297 | −5.22514 | 2.09E−12 |

[0567] Whole blood genome wide expression signature provides a starting point for differentiating between patients with IBD and controls and this may provide complimentary diagnostic evidence of the diagnosis of IBD.

The application's sequence listing, which the Patent Office published only in electronic form, follows.

SEQUENCE LISTING (269 sequences)

SEQ ID NO: 1 - DNA, 475 bp, Homo sapiens
acacatctgctcctgctctctctcctccagcgaccctagccatgagaaccctcaccatcctcactgctgttctcctcgtggccctccaggccaaggctgagccactccaagctgaggatgatccactgcaggcaaaagcttatgaggctgatgcccaggagcagcgtggggcaaatgaccaggactttgccgtctcctttgcagaggatgcaagctcaagtcttagagctttgggctcaacaagggctttcacttgccattgcagaaggtcctgttattcaacagaatattcctatgggacctgcactgtcatgggtattaaccacagattctgctgcctctgagggatgagaacagagagaaatatattcataatttactttatgacctagaaggaaactgtcgtgtgtcccatacattgccatcaactttgtttcctcatctcaaataaagtcctttcagcaaaaaaaaaaaa

SEQ ID NO: 2 - protein, 100 aa, Homo sapiens
MRTLTILTAVLLVALQAKAEPLQAEDDPLQAKAYEADAQEQRGANDQDFAVSFAEDASSSLRALGSTRAFTCHCRRSCYSTEYSYGTCTVMGINHRFCCL

SEQ ID NO: 3 - DNA, 449 bp, Homo sapiens
atatccactcctgctctccctcctgcaggtgaccccagccatgaggaccatcgccatccttgctgccattctcctggtggccctgcaggcccaggctgagtcactccaggaaagagctgatgaggctacaacccagaagcagtctggggaagacaaccaggaccttgctatctcctttgcaggaaatggactctctgctcttagaacctcaggttctcaggcaagagccacctgctattgccgaaccggccgttgtgctacccgtgagtccctctccggggtgtgtgaaatcagtggccgcctctacagactctgctgtcgctgagcttcctagatagaaaccaaagcagtgcaagattcagttcaaggtcctgaaaaaagaaaaacattttactctgtgtaccttgtgtctttctaaatttctctctccaaaataaagttcaagcatt

SEQ ID NO: 4 - protein, 94 aa, Homo sapiens
MRTIAILAAILLVALQAQAESLQERADEATTQKQSGEDNQDLAISFAGNGLSALRTSGSQARATCYCRTGRCATRESLSGVCEISGRLYRLCCR

SEQ ID NO: 5 - DNA, 1726 bp, Homo sapiens
gtcaggttcatggttacgaagctgctgaccccaggatcccagcccgtgggagagaagggggtctctgacagcccccacccctccccactgccagatccttattgggtctgagtttcaggggtggggccccagctggaggttataaaacagctcaatcggggagtacaaccttcggtttctcttcggggaaagctgctttcagcgcacacgggaagatatcagaaacatcctaggatcaggacaccccagatcttctcaactggaaccacgaaggctgtttcttccacacagcactttgatctccatttaagcaggcacctctgtcctgcgttccggagctgcgttcccgatggtcctcctttggctcacgctgctcctgatcgccctgccctgtctcctgcaaacgaaggaagatccaaacccaccaatcacgaacctaaggatgaaagcaaaggctcagcagttgacctgggaccttaacagaaatgtgaccgatatcgagtgtgttaaagacgccgactattctatgccggcagtgaacaatagctattgccagtttggagcaatttccttatgtgaagtgaccaactacaccgtccgagtggccaacccaccattctccacgtggatcctcttccctgagaacagtgggaagccttgggcaggtgcggagaatctgacctgctggattcatgacgtggatttcttgagctgcagctgggcggtaggcccgggggcccccgcggacgtccagtacgacctgtacttgaacgttgccaacaggcgtcaacagtacgagtgtcttcactacaaaacggatgctcagggaacacgtatcgggtgtcgtttcgatgacatctctcgactctccagcggttctcaaagttcccacatcctggtgcggggcaggagcgcagccttcggtatcccctgcacagataagtttgtcgtcttttcacagattgagatattaactccacccaacatgactgcaaagtgtaataagacacattcctttatgcactggaaaatgagaagtcatttcaatcgcaaatttcgctatgagcttcagatacaaaagagaatgcagcctgtaatcacagaacaggtcagagacagaacctccttccagctactcaatcctggaacgtacacagtacaaataagagcccgggaaagagtgtatgaattcttgagcgcctggagcaccccccagcgcttcgagtgcgaccaggaggagggcgcaaacacacgtgcctggcggacgtcgctgctgatcgcgctggggacgctgctggccctggtctgtgtcttcgtgatctgcagaaggtatctggtgatgcagagactctttccccgcatccctcacatgaaagaccccatcggtgacagcttccaaaacgacaagctggtggtctgggaggcgggcaaagccggcctggaggagtgtctggtgactgaagtacaggtcgtgcagaaaacttgagactggggttcagggcttgtgggggtctgcctcaatctccctggccgggccaggcgcctgcacagactggctgctggacctgcgcacgcagcccaggaatggacattcctaacgggtggtgggcatgggagatgcctgtgtaatttcgtccgaagctgccaggaagaagaacagaactttgtgtgtttatttcatgataaagtgatttttttttttttaacccaaaaaaaaaaaaaaaaa

SEQ ID NO: 6 - protein, 378 aa, Homo sapiens
MVLLWLTLLLIALPCLLQTKEDPNPPITNLRMKAKAQQLTWDLNRNVTDIECVKDADYSMPAVNNSYCQFGAISLCEVTNYTVRVANPPFSTWILFPENSGKPWAGAENLTCWIHDVDFLSCSWAVGPGAPADVQYDLYLNVANRRQQYECLHYKTDAQGTRIGCRFDDISRLSSGSQSSHILVRGRSAAFGIPCTDKFVVFSQIEILTPPNMTAKCNKTHSFMHWKMRSHFNRKFRYELQIQKRMQPVITEQVRDRTSFQLLNPGTYTVQIRARERVYEFLSAWSTPQRFECDQEEGANTRAWRTSLLIALGTLLALVCVFVICRRYLVMQRLFPRIPHMKDPIGDSFQNDKLVVWEAGKAGLEECLVTEVQVVQKT

SEQ ID NO: 7 - DNA, 2308 bp, Homo sapiens
gagagactggatggacccacaagggtgacagcccaggcggaccgatcttcccatcccacatcctccggcgcgatgccaaaaagaggctgacggcaactgggccttctgcagagaaagacctccgcttcactgccccggctggtcccaagggtcaggaagatggattcatacctgctgatgtggggactgctcacgttcatcatggtgcctggctgccaggcagagctctgtgacgatgacccgccagagatcccacacgccacattcaaagccatggcctacaaggaaggaaccatgttgaactgtgaatgcaagagaggtttccgcagaataaaaagcgggtcactctatatgctctgtacaggaaactctagccactcgtcctgggacaaccaatgtcaatgcacaagctctgccactcggaacacaacgaaacaagtgacacctcaacctgaagaacagaaagaaaggaaaaccacagaaatgcaaagtccaatgcagccagtggaccaagcgagccttccaggtcactgcagggaacctccaccatgggaaaatgaagccacagagagaatttatcatttcgtggtggggcagatggtttattatcagtgcgtccagggatacagggctctacacagaggtcctgctgagagcgtctgcaaaatgacccacgggaagacaaggtggacccagccccagctcatatgcacaggtgaaatggagaccagtcagtttccaggtgaagagaagcctcaggcaagccccgaaggccgtcctgagagtgagacttcctgcctcgtcacaacaacagattttcaaatacagacagaaatggctgcaaccatggagacgtccatatttacaacagagtaccaggtagcagtggccggctgtgttttcctgctgatcagcgtcctcctcctgagtgggctcacctggcagcggagacagaggaagagtagaagaacaatctagaaaaccaaaagaacaagaatttcttggtaagaagccgggaacagacaacagaagtcatgaagcccaagtgaaatcaaaggtgctaaatggtcgcccaggagacatccgttgtgcttgcctgcgttttggaagctctgaagtcacatcacaggacacggggcagtggcaaccttgtctctatgccagctcagtcccatcagagagcgagcgctacccacttctaaatagcaatttcgccgttgaagaggaagggcaaaaccactagaactctccatcttattttcatgtatatgtgttcattaaagcatgaatggtatggaactctctccaccctatatgtagtataaagaaaagtaggtttacattcatctcattccaacttcccagttcaggagtcccaaggaaagccccagcactaacgtaaatacacaacacacacactctaccctatacaactggacattgtctgcgtggttcctttctcagccgcttctgactgctgattctcccgttcacgttgcctaataaacatccttcaagaactctgggctgctacccagaaatcattttacccttggctcaatcctctaagctaacccccttctactgagccttcagtcttgaatttctaaaaaacagaggccatggcagaataatctttgggtaacttcaaaacggggcagccaaacccatgaggcaatgtcaggaacagaaggatgaatgaggtcccaggcagagaatcatacttagcaaagttttacctgtgcgttactaattggcctctttaagagttagtttctttgggattgctatgaatgataccctgaatttggcctgcactaatttgatgtttacaggtggacacacaaggtgcaaatcaatgcgtacgtttcctgagaagtgtctaaaaacaccaaaaagggatccgtacattcaatgtttatgcaaggaaggaaagaaagaaggaagtgaagagggagaagggatggaggtcacactggtagaacgtaaccacggaaaagagcgcatcaggcctggcacggtggctcaggcctataaccccagctccctaggagaccaaggcgggagcatctcttgaggccaggagtttgagaccagcctgggcagcatagcaagacacatccctacaaaaaattagaaattggctggatgtggtggcatacgcctgtagtcctagccactcaggaggctgaggcaggaggattgcttgagcccaggagttcgaggctgcagtcagtcatgatggcaccactgcactccagcctgggcaacagagcaagatcctgtctttaaggaaaaaaagacaagg

SEQ ID NO: 8 - protein, 272 aa, Homo sapiens
MDSYLLMWGLLTFIMVPGCQAELCDDDPPEIPHATFKAMAYKEGTMLNCECKRGFRRIKSGSLYMLCTGNSSHSSWDNQCQCTSSATRNTTKQVTPQPEEQKERKTTEMQSPMQPVDQASLPGHCREPPPWENEATERIYHFVVGQMVYYQCVQGYRALHRGPAESVCKMTHGKTRWTQPQLICTGEMETSQFPGEEKPQASPEGRPESETSCLVTTTDFQIQTEMAATMETSIFTTEYQVAVAGCVFLLISVLLLSGLTWQRRQRKSRRTI

SEQ ID NO: 9 - DNA, 807 bp, Homo sapiens
aaaccataccatatcccaccagagagtgactcctgattgcctcctcaagtcgcagacactatgctgcctcccatggccctgcccagtgtatcttggatgctgctttcctgcctcatgctgctgtctcaggttcaaggtgaagaaccccagagggaactgccctctgcacggatccgctgtcccaaaggctccaaggcctatggctcccactgctatgccttgtttttgtcaccaaaatcctggacagatgcagatctggcctgccagaagcggccctctggaaacctggtgtctgtgctcagtggggctgagggatccttcgtgtcctccctggtgaagagcattggtaacagctactcatacgtctggattgggctccatgaccccacacagggcaccgagcccaatggagaaggttgggagtggagtagcagtgatgtgatgaattactttgcatgggagagaaatccctccaccatctcaagccccggccactgtgcgagcctgtcgagaagcacagcatttctgaggtggaaagattataactgtaatgtgaggttaccctatgtctgcaagttcactgactagtgcaggagggaagtcagcagcctgtgtttggtgtgcaactcatcatgggcatgagaccagtgtgaggactcaccctggaagagaatattcgcttaattcccccaacctgaccacctcattcttatctttcttctgtttcttcctccccgctgtcatttcagtctcttcattttgtcatacggcctaaggctttaaagagcaataaaatttttagtctgc

SEQ ID NO: 10 - protein, 175 aa, Homo sapiens
MLPPMALPSVSWMLLSCLMLLSQVQGEEPQRELPSARIRCPKGSKAYGSHCYALFLSPKSWTDADLACQKRPSGNLVSVLSGAEGSFVSSLVKSIGNSYSYVWIGLHDPTQGTEPNGEGWEWSSSDVMNYFAWERNPSTISSPGHCASLSRSTAFLRWKDYNCNVRLPYVCKFTD

SEQ ID NO: 11 - DNA, 773 bp, Homo sapiens
aagccacctcaagtggacaaggcacttaccaacagagattgctgatttgctccttaagcaagagattcactgccgctaagcatggctcagaccaactcgttcttcatgctgatctcctccctgatgttcctgtctctgagccaaggccaggagtcccagacagagctgcctaatccccgaatcagctgcccagaaggcaccaatgcctatcgctcctactgctactactttaatgaagaccctgagacctgggttgatgcagatctctattgccagaacatgaattcaggcaacctggtgtctgtgctcacccaggcggagggtgccttcgtggcctcactgattaaggagagtagcactgatgacagcaatgtctggattggcctccatgacccaaaaaagaaccgccgctggcactggagtagtgggtccctggtctcctacaagtcctgggacactggatccccgagcagtgctaatgctggctactgtgcaagcctgacttcatgctcaggattcaagaaatggaaggatgaatcttgtgagaagaagttctcctttgtttgcaagttcaaaaactagaggaagctgaaaaatggatgtctagaactggtcctgcaattactatgaagtcaaaaattaaactagactatgtctccaactcagttcagaccatctcctccctaatgagtttgcatcgctgatcttcagtaccttcacctgtctcagtctctagagccctgaaaaataaaaacaaacttatttttatccag

SEQ ID NO: 12 - protein, 166 aa, Homo sapiens
MAQTNSFFMLISSLMFLSLSQGQESQTELPNPRISCPEGTNAYRSYCYYFNEDPETWVDADLYCQNMNSGNLVSVLTQAEGAFVASLIKESSTDDSNVWIGLHDPKKNRRWHWSSGSLVSYKSWDTGSPSSANAGYCASLTSCSGFKKWKDESCEKKFSFVCKFKN

SEQ ID NO: 13 - DNA, 2693 bp, Homo sapiens
ggagagaaatggctgaaagtggaaacccggagcggtttggggcgcttcgcaaagttctccagctcggcgagccggcggtgtgtctaccagaggctgggggccagtccatctggtcctgcccgacgccacttccaccccgcgagctctgggaaaggtctctacgtgacgccaagggccgtcgcggccccggggagagggatcgaaagactcactctgcgaggtgtttacactggaggtgggggacgggaagggactgggcaaagttacctggactcaactaaattcctgcgcttgcttagtgttgacatttgaataggatccgagatgttctgcttttatcccgggcagccctgatatgtcagcaacaggctgaggttccagacctgaaatcgcactgcaagaaaaaggggtttgctgaactaactccaagctggtgtgcctagcgtccgcgcggctgccggcccaagagctggagtcaccatggcggccggagttgcggcctggctgccttttgcccgggctgcggccatcgggtggatgccggtggccaactgccccatgcccctggccccggccgacaagaacaagcggcaggatgagctgattgtcctcaacgtgagtgggcggaggttccagacctggaggaccacgctggagcgctacccggacaccctgctgggcagcacggagaaggagttcttcttcaacgaggacaccaaggagtacttcttcgaccgggaccccgaggtgttccgctgcgtgctcaacttctaccgcacggggaagctgcactacccgcgctacgagtgcatctctgcctacgacgacgagctggccttctacggcatcctcccggagatcatcggggactgctgctacgaggagtacaaggaccgcaagagggagaacgccgagcggctcatggacgacaacgactcggagaacaaccaggagtccatgccctcgctcagcttccgccagaccatgtggcgggccttcgagaacccccacaccagcacgctggccctggtcttctactacgtgactggcttcttcatcgctgtctcggtcatcaccaacgtggtggagacggtgccgtgcggcacggtcccgggcagcaaggagctgccgtgcggggagcgctactcggtggccttcttctgcctggacacggcgtgcgtcatgatcttcaccgtggagtacctcctgcggctcttcgcggctcccagccgctaccgcttcatccgcagcgtcatgagcatcatcgacgtggtggccatcatgccctactacatcggtctggtcatgaccaacaacgaggacgtgtccggcgccttcgtcacgctccgggtcttccgcgtcttcaggatcttcaagttttcccgccactcccagggcctgcggatcctgggctacacactgaagagctgtgcctccgaactgggctttcttctcttctccctcaccatggccatcatcatctttgccactgtgatgttttatgccgagaagggctcctcggccagcaagttcacaagcatccctgcctcgttttggtacaccattgtcaccatgaccacactggggtacggagacatggtgcctaagacgattgcagggaagatcttcggctccatctgctccttgagtggcgtcctggtcattgccctgccagtccctgtgattgtttccaactttagccggatttaccaccagaatcagagagctgataaacgcagggcacaaaagaaggcccgccttgccaggatccgtgtggccaaaacaggcagttcgaatgcatacctgcacagcaagcgcaacgggctcctcaacgaggcgctggagctgacgggcaccccagaagaggagcacatgggcaagaccacctcactcatcgagagccagcatcatcacctgctgcactgcctggaaaaaaccactgggttgtcctatcttgtggatgatcccctgttatctgtacgaacctccaccatcaagaaccacgagtttattgatgagcagatgtttgagcagaactgcatggagagttcaatgcagaactacccatccacaagaagtccctcactgtccagccacccaggcctcactaccacctgctgctcccgtcgtagtaagaagaccacacacctgcccaattctaacctgccagctactcgcctgcgcagcatgcaagagctcagcacgatccacatccagggcagtgagcagccctccctcacaaccagtcgctccagccttaatttgaaagcagacgacggactgagaccaaactgcaaaacatcccagatcaccacagccatcatcagcatccccactcccccagcgctaaccccagagggggaaagtcggccaccccctgccagcccaggccccaacacgaacattccttccatagccagcaatgttgtcaaggtctccgccttgtaaaaccactggacagagggccagagtgggtagtggggaatgaaggggactggcatgttggtgggtggtcactgagaccactccctcccccctttccccactatttctgcctgccccattgtacccctagcactgagacttgtgcctggaaggaaaaagaggtagcaaaggggcacctgaggttcacgctgctagcgtggacatagccctgtgatactgcatctcactggggccagaggaagggaggg

SEQ ID NO: 14 - protein, 655 aa, Homo sapiens
MAAGVAAWLPFARAAAIGWMPVANCPMPLAPADKNKRQDELIVLNVSGRRFQTWRTTLERYPDTLLGSTEKEFFFNEDTKEYFFDRDPEVFRCVLNFYRTGKLHYPRYECISAYDDELAFYGILPEIIGDCCYEEYKDRKRENAERLMDDNDSENNQESMPSLSFRQTMWRAFENPHTSTLALVFYYVTGFFIAVSVITNVVETVPCGTVPGSKELPCGERYSVAFFCLDTACVMIFTVEYLLRLFAAPSRYRFIRSVMSIIDVVAIMPYYIGLVMTNNEDVSGAFVTLRVFRVFRIFKFSRHSQGLRILGYTLKSCASELGFLLFSLTMAIIIFATVMFYAEKGSSASKFTSIPASFWYTIVTMTTLGYGDMVPKTIAGKIFGSICSLSGVLVIALPVPVIVSNFSRIYHQNQRADKRRAQKKARLARIRVAKTGSSNAYLHSKRNGLLNEALELTGTPEEEHMGKTTSLIESQHHHLLHCLEKTTGLSYLVDDPLLSVRTSTIKNHEFIDEQMFEQNCMESSMQNYPSTRSPSLSSHPGLTTTCCSRRSKKTTHLPNSNLPATRLRSMQELSTIHIQGSEQPSLTTSRSSLNLKADDGLRPNCKTSQITTAIISIPTPPALTPEGESRPPPASPGPNTNIPSIASNVVKVSAL

SEQ ID NO: 15 - DNA, 799 bp, Homo sapiens
cactcccaaagaactgggtactcaacactgagcagatctgttctttgagctaaaaaccatgtgctgtaccaagagtttgctcctggctgctttgatgtcagtgctgctactccacctctgcggcgaatcagaagcagcaagcaactttgactgctgtcttggatacacagaccgtattcttcatcctaaatttattgtgggcttcacacggcagctggccaatgaaggctgtgacatcaatgctatcatctttcacacaaagaaaaagttgtctgtgtgcgcaaatccaaaacagacttgggtgaaatatattgtgcgtctcctcagtaaaaaagtcaagaacatgtaaaaactgtggcttttctggaatggaattggacatagcccaagaacagaaagaaccttgctggggttggaggtttcacttgcacatcatggagggtttagtgcttatctaatttgtgcctcactggacttgtccaattaatgaagttgattcatattgcatcatagtttgctttgtttaagcatcacattaaagttaaactgtattttatgttatttatagctgtaggttttctgtgtttagctatttaatactaattttccataagctattttggtttagtgcaaagtataaaattatatttgggggggaataagattatatggactttcttgcaagcaacaagctattttttaaaaaaactatttaacattcttttgtttatattgttttgtctcctaaattgttgtaattgcattataaaataagaaaaacattaataagacaaatatt

SEQ ID NO: 16 - protein, 96 aa, Homo sapiens
MCCTKSLLLAALMSVLLLHLCGESEAASNFDCCLGYTDRILHPKFIVGFTRQLANEGCDINAIIFHTKKKLSVCANPKQTWVKYIVRLLSKKVKNM

SEQ ID NO: 17 - DNA, 970 bp, Homo sapiens
gaagcgggaaagggccacaatggggtctgggaggtgggcggggcggagcggggatgtccagccacgtcgctttgttttcccacgctaggagctaccacaacaggtgctgcgagccgtaagcgccccccacccgcgctatgggctcggacgcctgggtgggcctttggcggccacaccggccccgcggccccatcgcggcgcactacggaggccccgggcccaaatacaagctgccgcccaacaccggctacgccctgcatgacccgtcgcggccgcgcgcccccgccttcaccttcggcgcgcgcttccccacgcagcagacgacgtgcggccccgggccaggccacctggtgcccgctcgcatgaccgtgcgcggcaccgacggcgcccccgcctactccatctacggccgcccacgccgctcagcgcccttcctcactccgggacctggcaggtacttcccggagcgagcggggaacgcgacgtaccccagtgcgcctcggcacaccattgctccccgaaactggggtgtccaggcggaacagcagagcccaggtcccgcggcctatacggtgccctcgctcttgggtccgcgcgtcatcggcaaagtctccgccccaacttgctccatctacggccgcagagcggctggcagtttcttcgaggacctcagcaagaccccgggcccctgcgcctatcaggtcgtgagtccaggggtctacaagtcccgggccccccagttcacgattctggcgcggacttcgctcccccaagacaacactcggaagccagggcccgcggcctacaacgtggatcagcaccggaagccccgcggctggagtttcgggatccggcactcggactacctggccccgctggtgaccgacgcggacaactgacccgccaggcgggagcggccccacacgtgtttgcttaaagtctgcgagtccgcaaaaaaaaaaaaaaaaaa

SEQ ID NO: 18 - protein, 253 aa, Homo sapiens
MGSDAWVGLWRPHRPRGPIAAHYGGPGPKYKLPPNTGYALHDPSRPRAPAFTFGARFPTQQTTCGPGPGHLVPARMTVRGTDGAPAYSIYGRPRRSAPFLTPGPGRYFPERAGNATYPSAPRHTIAPRNWGVQAEQQSPGPAAYTVPSLLGPRVIGKVSAPTCSIYGRRAAGSFFEDLSKTPGPCAYQVVSPGVYKSRAPQFTILARTSLPQDNTRKPGPAAYNVDQHRKPRGWSFGIRHSDYLAPLVTDADN

SEQ ID NO: 19 - DNA, 1498 bp, Homo sapiens
accaaacctcttcgaggcacaaggcacaacaggctgctctgggattctcttcagccaatcttcattgctcaagtgtctgaagcagccatggcagaagtacctgagctcgccagtgaaatgatggcttattacagtggcaatgaggatgacttgttctttgaagctgatggccctaaacagatgaagtgctccttccaggacctggacctctgccctctggatggcggcatccagctacgaatctccgaccaccactacagcaagggcttcaggcaggccgcgtcagttgttgtggccatggacaagctgaggaagatgctggttccctgcccacagaccttccaggagaatgacctgagcaccttctttcccttcatctttgaagaagaacctatcttcttcgacacatgggataacgaggcttatgtgcacgatgcacctgtacgatcactgaactgcacgctccgggactcacagcaaaaaagcttggtgatgtctggtccatatgaactgaaagctctccacctccagggacaggatatggagcaacaagtggtgttctccatgtcctttgtacaaggagaagaaagtaatgacaaaatacctgtggccttgggcctcaaggaaaagaatctgtacctgtcctgcgtgttgaaagatgataagcccactctacagctggagagtgtagatcccaaaaattacccaaagaagaagatggaaaagcgatttgtcttcaacaagatagaaatcaataacaagctggaatttgagtctgcccagttccccaactggtacatcagcacctctcaagcagaaaacatgcccgtcttcctgggagggaccaaaggcggccaggatataactgacttcaccatgcaatttgtgtcttcctaaagagagctgtacccagagagtcctgtgctgaatgtggactcaatccctagggctggcagaaagggaacagaaaggtttttgagtacggctatagcctggactttcctgttgtctacaccaatgcccaactgcctgccttagggtagtgctaagaggatctcctgtccatcagccaggacagtcagctctctcctttcagggccaatccccagcccttttgttgagccaggcctctctcacctctcctactcacttaaagcccgcctgacagaaaccacggccacatttggttctaagaaaccctctgtcattcgctcccacattctgatgagcaaccgcttccctatttatttatttatttgtttgtttgttttattcattggtctaatttattcaaagggggcaagaagtagcagtgtctgtaaaagagcctagtttttaatagctatggaatcaattcaatttggactggtgtgctctctttaaatcaagtcctttaattaagactgaaaatatataagctcagattatttaaatgggaatatttataaatgagcaaatatcatactgttcaatggttctgaaataaacttcactgaag

SEQ ID NO: 20 - protein, 269 aa, Homo sapiens
MAEVPELASEMMAYYSGNEDDLFFEADGPKQMKCSFQDLDLCPLDGGIQLRISDHHYSKGFRQAASVVVAMDKLRKMLVPCPQTFQENDLSTFFPFIFEEEPIFFDTWDNEAYVHDAPVRSLNCTLRDSQQKSLVMSGPYELKALHLQGQDMEQQVVFSMSFVQGEESNDKIPVALGLKEKNLYLSCVLKDDKPTLQLESVDPKNYPKKKMEKRFVFNKIEINNKLEFESAQFPNWYISTSQAENMPVFLGGTKGGQDITDFTMQFVSS

SEQ ID NO: 21 - DNA, 1103 bp, Homo sapiens
cacagagcccgggccgcaggcacctcctcgccagctcttccgctcctctcacagccgccagacccgcctgctgagccccatggcccgcgctgctctctccgccgcccccagcaatccccggctcctgcgagtggcactgctgctcctgctcctggtagccgctggccggcgcgcagcaggagcgtccgtggccactgaactgcgctgccagtgcttgcagaccctgcagggaattcaccccaagaacatccaaagtgtgaacgtgaagtcccccggaccccactgcgcccaaaccgaagtcatagccacactcaagaatgggcggaaagcttgcctcaatcctgcatcccccatagttaagaaaatcatcgaaaagatgctgaacagtgacaaatccaactgaccagaagggaggaggaagctcactggtggctgttcctgaaggaggccctgcccttataggaacagaagaggaaagagagacacagctgcagaggccacctggattgtgcctaatgtgtttgagcatcgcttaggagaagtcttctatttatttatttattcattagttttgaagattctatgttaatattttaggtgtaaaataattaagggtatgattaactctacctgcacactgtcctattatattcattctttttgaaatgtcaaccccaagttagttcaatctggattcatatttaatttgaaggtagaatgttttcaaatgttctccagtcattatgttaatatttctgaggagcctgcaacatgccagccactgtgatagaggctggcggatccaagcaaatggccaatgagatcattgtgaaggcaggggaatgtatgtgcacatctgttttgtaactgtttagatgaatgtcagttgttatttattgaaatgatttcacagtgtgtggtcaacatttctcatgttgaaactttaagaactaaaatgttctaaatatcccttggacattttatgtctttcttgtaaggcatactgccttgtttaatggtagttttacagtgtttctggcttagaacaaaggggcttaattattgatgttttcatagagaatataaaaataaagcacttatag

SEQ ID NO: 22 - protein, 107 aa, Homo sapiens
MARAALSAAPSNPRLLRVALLLLLLVAAGRRAAGASVATELRCQCLQTLQGIHPKNIQSVNVKSPGPHCAQTEVIATLKNGRKACLNPASPIVKKIIEKMLNSDKSN

SEQ ID NO: 23 - DNA, 1103 bp, Homo sapiens; identical to SEQ ID NO: 21

SEQ ID NO: 24 - protein, 107 aa, Homo sapiens; identical to SEQ ID NO: 22

SEQ ID NO: 25 - DNA, 5243 bp, Homo sapiens
agcgtgagactcgcgccctccggcacggaaaaggccaggcgacaggtgtcgcttgaaaagactgggcttgtccttgctggtgcatgcgtcgtcggcctctgggcagcaggtttacaaaggaggaaaacgacttcttctagatttttttttcagtttcttctataaatcaaaacatctcaaaatggagacctaaaatccttaaagggacttagtctaatctcgggaggtagttttgtgcatgggtaaacaaattaagtattaactggtgttttactatccaaagaatgctaattttataaacatgatcgagttatataaggtataccataatgagtttgattttgaatttgatttgtggaaataaaggaaaagtgattctagctggggcatattgttaaagcatttttttcagagttggccaggcagtctcctactggcacattctcccattatgtagaatagaaatagtacctgtgtttgggaaagattttaaaatgagtgacagttatttggaacaaagagctaataatcaatccactgcaaattaaagaaacatgcagatgaaagttttgacacattaaaatacttctacagtgacaaagaaaaatcaagaacaaagctttttgatatgtgcaacaaatttagaggaagtaaaaagataaatgtgatgattggtcaagaaattatccagttatttacaaggccactgatattttaaacgtccaaaagtttgtttaaatgggctgttaccgctgagaatgatgaggatgagaatgatggttgaaggttacattttaggaaatgaagaaacttagaaaattaatataaagacagtgatgaatacaaagaagatttttataacaatgtgtaaaatttttggccagggaaaggaatattgaagttagatacaattacttacctttgagggaaataattgttggtaatgagatgtgatgtttctcctgccacctggaaacaaagcattgaagtctgcagttgaaaagcccaacgtctgtgagatccaggaaaccatgcttgcaaaccactggtaaaaaaaaaaaaaaaaaaaaaaaaaagccacagtgacttgcttattggtcattgctagtattatcgactcagaacctctttactaatggctagtaaatcataattgagaaattctgaattttgacaaggtctctgctgttgaaatggtaaatttattattttttttgtcatgataaattctggttcaaggtatgctatccatgaaataatttctgaccaaaactaaattgatgcaatttgattatccatcttagcctacagatggcatctggtaacttttgactgttttaaaaaataaatccactatcagagtagatttgatgttggcttcagaaacatttagaaaaacaaaagttcaaaaatgttttcaggaggtgataagttgaataactctacaatgttagttctttgagggggacaaaaaatttaaaatctttgaaaggtcttattttacagccatatctaaattatcttaagaaaatttttaacaaagggaatgaaatatatatcatgattctgtttttccaaaagtaacctgaatatagcaatgaagttcagttttgttattggtagtttgggcagagtctctttttgcagcacctgttgtctaccataattacagaggacatttccatgttctagccaagtatactattagaataaaaaaacttaacattgagttgcttcaacagcatgaaactgagtccaaaagaccaaatgaacaaacacattaatctctgattatttattttaaatagaatatttaattgtgtaagatctaatagtatcattatacttaagcaatcatattcctgatgatctatgggaaataactattatttaattaatattgaaaccaggttttaagatgtgttagccagtcctgttactagtaaatctctttatttggagagaaattttagattgttttgttctccttattagaaggattgtagaaagaaaaaaatgactaattggagaaaaattggggatatatcatatttcactgaattcaaaatgtcttcagttgtaaatcttaccattattttacgtacctctaagaaataaaagtgcttctaattaaaatatgatgtcattaattatgaaatacttcttgataacagaagttttaaaatagccatcttagaatcagtgaaatatggtaatgtattattttcctcctttgagttaggtcttgtgcttttttttcctggccactaaatttcacaatttccaaaaagcaaaataaacatattctgaatatttttgctgtgaaacacttgacagcagagctttccaccatgaaaagaagcttcatgagtcacacattacatctttgggttgattgaatgccactgaaacattctagtagcctggagaagttgacctacctgtggagatgcctgccattaaatggcatcctgatggcttaatacacatcactcttctgtgaagggttttaattttcaacacagcttactctgtagcatcatgtttacattgtatgtataaagattatacaaaggtgcaattgtgtatttcttccttaaaatgtatcagtataggatttagaatctccatgttgaaactctaaatgcatagaaataaaaataataaaaaatttttcattttggcttttcagcctagtattaaaactgataaaagcaaagccatgcacaaaactacctccctagagaaaggctagtcccttttcttccccattcatttcattatgaacatagtagaaaacagcatattcttatcaaatttgatgaaaagcgccaacacgtttgaactgaaatacgacttgtcatgtgaactgtaccgaatgtctacgtattccacttttcctgctggggttcctgtctcagaaaggagtcttgctcgtgctggtttctattacactggtgtgaatgacaaggtcaaatgcttctgttgtggcctgatgctggataactggaaaagaggagacagtcctactgaaaagcataaaaagttgtatcctagctgcagattcgttcagagtctaaattccgttaacaacttggaagctacctctcagcctacttttccttcttcagtaacaaattccacacactcattacttccgggtacagaaaacagtggatatttccgtggctcttattcaaactctccatcaaatcctgtaaactccagagcaaatcaagatttttctgccttgatgagaagttcctaccactgtgcaatgaataacgaaaatgccagattacttacttttcagacatggccattgacttttctgtcgccaacagatctggcaaaagcaggcttttactacataggacctggagacagagtggcttgctttgcctgtggtggaaaattgagcaattgggaaccgaaggataatgctatgtcagaacacctgagacattttcccaaatgcccatttatagaaaatcagcttcaagacacttcaagatacacagtttctaatctgagcatgcagacacatgcagcccgctttaaaacattctttaactggccctctagtgttctagttaatcctgagcagcttgcaagtgcgggtttttattatgtgggtaacagtgatgatgtcaaatgcttttgctgtgatggtggactcaggtgttgggaatctggagatgatccatgggttcaacatgccaagtggtttccaaggtgtgagtacttgataagaattaaaggacaggagttcatccgtcaagttcaagccagttaccctcatctacttgaacagctgctatccacatcagacagcccaggagatgaaaatgcagagtcatcaattatccattttgaacctggagaagaccattcagaagatgcaatcatgatgaatactcctgtgattaatgctgccgtggaaatgggctttagtagaagcctggtaaaacagacagttcagagaaaaatcctagcaactggagagaattatagactagtcaatgatcttgtgttagacttactcaatgcagaagatgaaataagggaagaggagagagaaagagcaactgaggaaaaagaatcaaatgatttattattaatccggaagaatagaatggcactttttcaacatttgacttgtgtaattccaatcctggatagtctactaactgccggaattattaatgaacaagaacatgatgttattaaacagaagacacagacgtctttacaagcaagagaactgattgatacgattttagtaaaaggaaatattgcagccactgtattcagaaactctctgcaagaagctgaagctgtgttatatgagcatttatttgtgcaacaggacataaaatatattcccacagaagatgtttcagatctaccagtggaagaacaattgcggagactacaagaagaaagaacatgtaaagtgtgtatggacaaagaagtgtccatagtgtttattccttgtggtcatctagtagtatgcaaagattgtgctccttctttaagaaagtgtcctatttgtaggagtacaatcaagggtacagttcgtacatttctttcatgaagaagaaccaaaacatcgtctaaactttagaattaatttattaaatgtattataactttaacttttatcctaatttggtttccttaaaatttttatttatttacaactcaaaaaacattgttttgtgtaacatatttatatatgtatctaaaccatatgaacatatattttttagaaactaagagaatgataggcttttgttcttatgaacgaaaaagaggtagcactacaaacacaatattcaatcaaaatttcagcattattgaaattgtaagtgaagtaaaacttaagatatttgagttaacctttaagaattttaaatattttggcattgtactaataccgggaacatgaagccaggtgtggtggtatgtgcctgtagtcccaggctgaggcaagagaattacttgagcccaggagtttgaatccatcctgggcagcatactgagaccctgcctttaaaaacaaacagaacaaaaacaaaacaccagggacacatttctctgtcttttttgatcagtgtcctatacatcgaaggtgtgcatatatgttgaatgacattttagggacatggtgtttttataaagaattctgtgagaaaaaatttaataaagcaacaaaaattactcttaaaaaaaaaaaaaaa

SEQ ID NO: 26 - protein, 604 aa, Homo sapiens
MNIVENSIFLSNLMKSANTFELKYDLSCELYRMSTYSTFPAGVPVSERSLARAGFYYTGVNDKVKCFCCGLMLDNWKRGDSPTEKHKKLYPSCRFVQSLNSVNNLEATSQPTFPSSVTNSTHSLLPGTENSGYFRGSYSNSPSNPVNSRANQDFSALMRSSYHCAMNNENARLLTFQTWPLTFLSPTDLAKAGFYYIGPGDRVACFACGGKLSNWEPKDNAMSEHLRHFPKCPFIENQLQDTSRYTVSNLSMQTHAARFKTFFNWPSSVLVNPEQLASAGFYYVGNSDDVKCFCCDGGLRCWESGDDPWVQHAKWFPRCEYLIRIKGQEFIRQVQASYPHLLEQLLSTSDSPGDENAESSIIHFEPGEDHSEDAIMMNTPVINAAVEMGFSRSLVKQTVQRKILATGENYRLVNDLVLDLLNAEDEIREEERERATEEKESNDLLLIRKNRMALFQHLTCVIPILDSLLTAGIINEQEHDVIKQKTQTSLQARELIDTILVKGNIAATVFRNSLQEAEAVLYEHLFVQQDIKYIPTEDVSDLPVEEQLRRLQEERTCKVCMDKEVSIVFIPCGHLVVCKDCAPSLRKCPICRSTIKGTVRTFLS

SEQ ID NO: 27 - DNA, 1400 bp, Homo sapiens
cggcaaaaaaaaaaggcgtaagaattttgaagctatgttcaaaggtatccttcagagtggattggataacttcgtgataaaccacatgctaaagaacaacgtggctggacaaacatctatccagaccctagtacctaatacggatcaaaagtcgaccagtgtaaaaaaagacaaccacaaaaaaaaaacagttaagatgttggaatacctgggcaaagatgttcttcatggtgtttttaattatttggcaaaacacgatgttctgacattgaaggaagaggaaaagaaaaaatattatgatgccaaaattgaagacaaggccctgatcttggtagactctttgcgaaagaatcgcgtggctcatcaaatgtttacccaaacacttctcaatatggaccaaaagatcaccagtgtaaaacctcttctgcaaatcgaggctggaccacctgagtcagcagaatctacaaatatactcaaactttgtcctcgtgaagaattcctgagactgtgtaaaaaaaatcatgatgagatctatccaataaaaaagagagaggaccgcagacgcctggctctcatcatatgcaatacaaagtttgatcacctgcctgcaaggaatggggctcactatgacatcgtggggatgaaaaggctgcttcaaggcctgggctacactgtggttgacgaaaagaatctcacagccagggatatggagtcagtgctgagggcatttgctgccagaccagagcacaagtcctctgacagcacgttcttggtactcatgtctcatggcatcctagagggaatctgcggaactgcgcataaaaagaaaaaaccggatgtgctgctttatgacaccatcttccagatattcaacaaccgcaactgcctcagtctaaaggacaaacccaaggtcatcattgtccaggcctgcagaggtgaaaaacatggggaactctgggtcagagactctccagcatccttggcagtcatctcttcacagtcatctgagaacctggaggcagattctgtttgcaagatccacgaggagaaggacttcattgctttctgttcttcaacaccacataacgtgtcctggagagaccgcacaaggggctccatcttcattacggaactcatcacatgcttccagaaatattcttgctgctgccacctaatggaaatatttcggaaggtacagaaatcatttgaagttccacaggctaaagcccagatgcccaccatagaacgagcaaccttgacaagagatttctacctctttcctggcaattgaaaatgaaaccacaggcagcccagccctcctctgtcaacatcaaagagcacatttaccagtatagcttgcatagtcaatatttggtatttcaataaaagtaaagactgta

SEQ ID NO: 28 - protein, 418 aa, Homo sapiens
MFKGILQSGLDNFVINHMLKNNVAGQTSIQTLVPNTDQKSTSVKKDNHKKKTVKMLEYLGKDVLHGVFNYLAKHDVLTLKEEEKKKYYDAKIEDKALILVDSLRKNRVAHQMFTQTLLNMDQKITSVKPLLQIEAGPPESAESTNILKLCPREEFLRLCKKNHDEIYPIKKREDRRRLALIICNTKFDHLPARNGAHYDIVGMKRLLQGLGYTVVDEKNLTARDMESVLRAFAARPEHKSSDSTFLVLMSHGILEGICGTAHKKKKPDVLLYDTIFQIFNNRNCLSLKDKPKVIIVQACRGEKHGELWVRDSPASLAVISSQSSENLEADSVCKIHEEKDFIAFCSSTPHNVSWRDRTRGSIFITELITCFQKYSCCCHLMEIFRKVQKSFEVPQAKAQMPTIERATLTRDFYLFPGN

SEQ ID NO: 29 - DNA, 5802 bp, Homo sapiens
tttatagcagcagtagaaatataccaccctagaggacacacctccttttagctaggtacctataaatgtccaggattttctattcaattgagaagaacccagcaaaatggggatctccacagtcatccttgaaatgtgtcttttatggggacaagttctatctacaggtgggtggatcccaaggactacagactacgcttcactgattccctcggaggtgcccttggatccaactgtagcagaaggttctccatttccctcggagtcgaccctggagtcaactgtagcagaaggttctccgatttccttggagtcaaccctggagtcaaccgtagcagaaggttctctgattccctcagagtcaaccctggagtcaactgtagcagaaggatctgattctggtttggccctgaggctggtgaatggagatggcaggtgtcagggccgagtggagatcctataccgaggctcctggggcaccgtgtgtgatgacagctgggacaccaatgatgccaacgtggtctgtaggcagctgggttgtggctgggccatgtcagctccaggaaatgcctggtttggccagggctcaggacccattgccctggatgatgtgcgctgctcaggacacgaatcctacctgtggagctgcccccacaatggctggctctcccataactgtggccatggtgaagatgctggtgttatctgctcagctgcccagcctcagtcaacactcaggccagaaagttggcctgtcaggatatcaccacctgtacccacagaaggatctgaatccagtttggccctgaggctggtgaatggaggcgacaggtgtcgaggccgagtggaggtcctataccgaggctcctggggcaccgtgtgtgatgactactgggacaccaatgatgccaatgtggtctgcaggcagctgggctgtggctgggccatgtcagccccaggaaatgcccagtttggccagggctcaggacccattgtcctggatgatgtgcgctgctcaggacatgagtcctacctgtggagctgcccccacaatggctggctcacccacaactgtggccatagtgaagacgctggtgtcatctgctcagctccccagtcccggccgacacccagcccagatacttggccgacctcacatgcatcaacagcaggacctgaatccagtttggccctgaggctggtgaatggaggtgacaggtgtcagggccgagtggaggtcctataccgaggctcctggggcaccgtgtgtgatgatagctgggacaccagtgacgccaatgtggtctgccggcagctgggctgtggctgggccacgtcagccccaggaaatgcccggtttggccagggttcaggacccattgtcctggatgacgtgcgctgctcaggctatgagtcctacctgtggagctgcccccacaatggctggctctcccataactgtcagcacagtgaagacgctggtgtcatctgctcagctgcccactcctggtcgacgcccagtccagacacattgccgaccatcaccttgcctgcatcgacagtaggatctgaatccagtttggccctgaggctggtgaatggaggtgacaggtgtcagggccgagtggaggtcctataccaaggctcctggggcaccgtgtgcgatgacagctgggacaccaatgatgccaatgtcgtctgcaggcaactgggctgtggctgggccatgtcagccccaggaaatgcccggtttggtcagggctcaggacccattgtcctggatgatgtgcgctgctcaggacacgagtcttacctgtggagctgcccccacaatggctggctctcccacaactgtggccatagtgaagacgctggtgtcatctgctcagcttcccagtcccggccaacacctagtccagacacttggccaacctcacatgcatcaacagcaggatctgaatccagtttggccctgaggctggtgaatggaggtgacaggtgtcagggccgagtggaggtcctataccgaggctcctggggcaccgtgtgtgatgactactgggacaccaatgatgccaatgtggtttgcaggcagctgggctgtggctgggccatgtcagccccaggaaatgcccggtttggccagggttcaggacccattgtcctggatgatgtgcgctgctcaggacatgagtcctatctgtggagctgcccccacaatggctggctctcccacaactgtggccatcatgaagacgctggtgtcatctgctcagcttcccagtcccagccgacacccagcccagacacttggccaacctcacatgcatcaacagcaggatctgaatccagtttggccctgaggctggtgaatggaggtgacaggtgtcagggccgagtggaggtcctataccgaggctcctggggcaccgtgtgtgatgactactgggacaccaatgatgccaatgtggtttgcaggcagctgggctgtggctgggccacgtcagccccaggaaatgcccggtttggccagggttcaggacccattgtcctggatgatgtgcgctgctcaggacatgagtcctatctgtggagctgcccccacaatggctggctctcccacaactgtggccatcatgaagacgctggtgtcatctgctcagcttcccagtcccagccgacacccagcccagacacttggccaacctctcgtgcatcaacagcaggatctgaatccactttggccctgagactggtgaatggaggtgacaggtgtcgaggccgagtggaggtcctataccaaggctcctggggcaccgtgtgtgatgactactgggacaccaatgatgccaacgtggtctgcaggcagctgggctgtggctgggccatgtcagccccaggaaatgcccagtttggccagggctcaggacccattgtcctggatgatgtgcgctgctcaggacacgagtcttacctgtggagctgcccccacaatggctggctctcccacaactgtggccatcatgaagatgctggtgtcatctgctcagctgctcagtcccagtcaacgcccaggccagatacttggctgaccaccaacttaccggcattgacagtaggatctgaatccagtttggctctgaggctggtgaatggaggtgacaggtgtcgaggccgagtggaggtcctgtatcgaggctcctggggaaccgtgtgtgatgacagctgggacaccaatgatgccaatgtggtctgcaggcagctgggctgtggctgggccatgtcggccccaggaaatgcccggtttggccagggctcaggacccattgtcctggatgatgtgcgctgctcagggaatgagtcctacctgtggagctgcccccacaaaggctggctcacccacaactgtggccatcacgaagacgctggtgtcatctgctcagccacccaaataaattctactacgacagattggtggcatccaacaactacaaccactgcaagaccctcttcaaattgtggtggcttcttattctatgccagtgggacattctccagcccatcctaccctgcatactaccccaacaatgctaagtgtgtttgggaaatagaagtgaattctggttatcgcataaacctgggcttcagtaatctgaaattggaggcacaccataactgcagttttgattatgttgaaatctttgatggatcattgaatagcagtctcctgctggggaaaatctgtaatgataccaggcaaatatttacatcttcttacaaccgaatgaccattcactttcgaagtgacatcagtttccaaaacactggctttttggcttggtataactccttcccaagcgatgccaccttgaggttggtcaatttaaattcatcctatggtctatgtgccgggcgtgtagaaatttaccatggtggcacctgggggacagtttgtgatgactcctggaccattcaggaagctgaggtggtctgcagacagctagggtgtggacgtgcagtttcagcccttggaaatgcatattttggctctggctctggccccatcaccctggacgatgtagagtgctcagggacggaatccactctctggcagtgccggaaccgaggctggttctcccacaactgtaatcatcgtgaagatgctggtgtcatctgctcaggaaaccatctatcgacacctgctccttttctcaacatcacccgtccaaacacagattattcctgcggaggcttcctatcccaaccatcaggggacttttccagcccattctatcccgggaactatccaaacaatgccaagtgtgtgtgggacattgaggtgcaaaacaactaccgtgtgactgtgatcttcagagatgtccagcttgaaggtggctgcaactatgattatattgaagttttcgatggcccctaccgcagttcccctctcattgctcgagtttgtgatggggccagaggctccttcacttcttcctccaacttcatgtccattcgcttcatcagtgaccacagcatcacaaggagagggttccgggctgagtactactccagtccctccaatgacagcaccaacctgctctgtctgccaaatcacatgcaagccagtgtgagcaggagctatctccaatccttgggcttttctgccagtgaccttgtcatttccacctggaatggatactacgagtgtcggccccagataacgccgaacctggtgatattcacaattccctactcaggctgcggcaccttcaagcaggcagacaatgacaccatcgactattccaacttcctcacagcagctgtctcaggtggcatcatcaagaggaggacagacctccgtattcacgtcagctgcagaatgcttcagaacacctgggtcgacaccatgtacattgctaatgacaccatccacgttgctaataacaccatccaggtcgaggaagtccagtatggcaattttgacgtgaacatttccttttatacttcctcatctttcttgtatcctgtgaccagccgcccttactacgtggacctgaaccaggacttgtacgttcaggctgaaatcctccattctgatgctgtactgaccttgtttgtggacacctgcgtggcatcaccatactccaatgacttcacgtctttgacttatgatctaatccggagtggatgcgtgagggatgacacctacggaccctactcctcgccatctcttcgcattgcccgcttccggttcagggccttccacttcctgaaccgcttcccctccgtgtacctgcgttgtaaaatggtggtgtgcagagcgtatgacccctcttcccgctgctaccgaggctgtgtgttgaggtcgaagagggatgtgggctcctaccaggaaaaggtggacgtcgtcctgggtcccatccagctgcagacccccccacgccgagaagaggagcctcggtaggtggtcgctctcagaccccactgtccaccggggcgcagacccctgactcggggacttgggatgttcctcttggtgtcatattccaactcagattgagccctacattgtgctgcacctggtcatacggagttgaatcagacctggttcccgcctcccccaaggctcatggtccttggaggacccgttgcagggtgaggtcaagagagttctgacctggatggcccatagacctgacgtcccagaatccatgcttctcatctgcaaaatgaaaatgtcaatacttacttcttagcactgttgagagggttacttacataaaggaattttggtgaaactgc

SEQ ID NO: 30 - protein, 1785 aa, Homo sapiens
MGISTVILEMCLLWGQVLSTGGWIPRTTDYASLIPSEVPLDPTVAEGSPFPSESTLESTVAEGSPISLESTLESTVAEGSLIPSESTLESTVAEGSDSGLALRLVNGDGRCQGRVEILYRGSWGTVCDDSWDTNDANVVCRQLGCGWAMSAPGNAWFGQGSGPIALDDVRCSGHESYLWSCPHNGWLSHNCGHGEDAGVICSAAQPQSTLRPESWPVRISPPVPTEGSESSLALRLVNGGDRCRGRVEVLYRGSWGTVCDDYWDTNDANVVCRQLGCGWAMSAPGNAQFGQGSGPIVLDDVRCSGHESYLWSCPHNGWLTHNCGHSEDAGVICSAPQSRPTPSPDTWPTSHASTAGPESSLALRLVNGGDRCQGRVEVLYRGSWGTVCDDSWDTSDANVVCRQLGCGWATSAPGNARFGQGSGPIVLDDVRCSGYESYLWSCPHNGWLSHNCQHSEDAGVICSAAHSWSTPSPDTLPTITLPASTVGSESSLALRLVNGGDRCQGRVEVLYQGSWGTVCDDSWDTNDANVVCRQLGCGWAMSAPGNARFGQGSGPIVLDDVRCSGHESYLWSCPHNGWLSHNCGHSEDAGVICSASQSRPTPSPDTWPTSHASTAGSESSLALRLVNGGDRCQGRVEVLYRGSWGTVCDDYWDTNDANVVCRQLGCGWAMSAPGNARFGQGSGPIVLDDVRCSGHESYLWSCPHNGWLSHNCGHHEDAGVICSASQSQPTPSPDTWPTSHASTAGSESSLALRLVNGGDRCQGRVEVLYRGSWGTVCDDYWDTNDANVVCRQLGCGWATSAPGNARFGQGSGPIVLDDVRCSGHESYLWSCPHNGWLSHNCGHHEDAGVICSASQSQPTPSPDTWPTSRASTAGSESTLALRLVNGGDRCRGRVEVLYQGSWGTVCDDYWDTNDANVVCRQLGCGWAMSAPGNAQFGQGSGPIVLDDVRCSGHESYLWSCPHNGWLSHNCGHHEDAGVICSAAQSQSTPRPDTWLTTNLPALTVGSESSLALRLVNGGDRCRGRVEVLYRGSWGTVCDDSWDTNDANVVCRQLGCGWAMSAPGNARFGQGSGPIVLDDVRCSGNESYLWSCPHKGWLTHNCGHHEDAGVICSATQINSTTTDWWHPTTTTTARPSSNCGGFLFYASGTFSSPSYPAYYPNNAKCVWEIEVNSGYRINLGFSNLKLEAHHNCSFDYVEIFDGSLNSSLLLGKICNDTRQIFTSSYNRMTIHFRSDISFQNTGFLAWYNSFPSDATLRLVNLNSSYGLCAGRVEIYHGGTWGTVCDDSWTIQEAEVVCRQLGCGRAVSALGNAYFGSGSGPITLDDVECSGTESTLWQCRNRGWFSHNCNHREDAGVICSGNHLSTPAPFLNITRPNTDYSCGGFLSQPSGDFSSPFYPGNYPNNAKCVWDIEVQNNYRVTVIFRDVQLEGGCNYDYIEVFDGPYRSSPLIARVCDGARGSFTSSSNFMSIRFISDHSITRRGFRAEYYSSPSNDSTNLLCLPNHMQASVSRSYLQSLGFSASDLVISTWNGYYECRPQITPNLVIFTIPYSGCGTFKQADNDTIDYSNFLTAAVSGGIIKRRTDLRIHVSCRMLQNTWVDTMYIANDTIHVANNTIQVEEVQYGNFDVNISFYTSSSFLYPVTSRPYYVDLNQDLYVQAEILHSDAVLTLFVDTCVASPYSNDFTSLTYDLIRSGCVRDDTYGPYSSPSLRIARFRFRAFHFLNRFPSVYLRCKMVVCRAYDPSSRCYRGCVLRSKRDVGSYQEKVDVVLGPIQLQTPPRREEEPR

SEQ ID NO: 31 - DNA, 4966 bp, Homo sapiens
gtagatgcagtccgccgccgccgctgcctcagccagcaatgcaagattagatctctaaatgcagcaaaacactgcctgaaaacagaccggcccgcgcagcaagcagacatttcacggtgcgctggggaagcttcaaaatatatctgtgactctgtcttcgttgctcttcatccccatcaatttcatcacgggaggcgagcagcaagtaagaatttcactttcggatctgcctagagacacacctccctgctccctcccccactcgatgtgaagagtattccggagtctccgggcgggagtagatttgcagcaccctagcgggagcgaggaaaacctactgattctttagctcattatcatctctcccagacgagatttccttcttatcgcctgcctcatcgctcaagtttgagcctcccgaagtccgggcgggagagacgaaacccctggctcacccccagccgcaggaagccaccgccttgctccaagcccctgcagctctgctgcaccgcagcttctcacccagtgcggatgctgtagatcaacaggttcagggaacttgagcagaataaggagagaccaccgggtgccgcagctcgggtgcagagggaaaaaaggacccatagacttgtggctcgcgtcgcgcgcgcacgctgcgccagggccccaggctggcgcgcactccctctctggctcctccagtccgattgctcctgcccccaccttacaggtctgggatgtacctttccatctgttgctgctttcttctatgggcccctgccctcactctcaagaacctcaactactccgtgccggaggagcaaggggccggcacggtgatcgggaacatcggcagggatgctcgactgcagcctgggcttccgcctgcagagcgcggcggcggagggcgcagcaagtcgggtagctaccgggtgctggagaactccgcaccgcacctgctggacgtggacgcagacagcgggctcctctacaccaagcagcgcatcgaccgcgagtccctgtgccgccacaatgccaagtgccagctgtccctcgaggtgttcgccaacgacaaggagatctgcatgatcaaggtagagatccaggacatcaacgacaacgcgccctccttctcctcggaccagatcgaaatggacatctcggagaacgctgctccgggcacccgcttccccctcaccagcgcacatgaccccgacgccggcgagaatgggctccgcacctacctgctcacgcgcgacgatcacggcctctttggactggacgttaagtcccgcggcgacggcaccaagttcccagaactggtcatccagaaggctctggaccgcgagcaacagaatcaccatacgctcgtgctgactgccctggacggtggcgagcctccacgttccgccaccgtacagatcaacgtgaaggtgattgactccaacgacaacagcccggtcttcgaggcgccatcctacttggtggaactgcccgagaacgctccgctgggtacagtggtcatcgatctgaacgccaccgacgccgatgaaggtcccaatggtgaagtgctctactctttcagcagctacgtgcctgaccgcgtgcgggagctcttctccatcgaccccaagaccggcctaatccgtgtgaagggcaatctggactatgaggaaaacgggatgctggagattgacgtgcaggcccgagacctggggcctaaccctatcccagcccactgcaaagtcacggtcaagctcatcgaccgcaacgacaatgcgccgtccatcggtttcgtctccgtgcgccagggggcgctgagcgaggccgcccctcccggcaccgtcatcgccctggtgcgggtcactgaccgggactctggcaagaacggacagctgcagtgtcgggtcctaggcggaggagggacgggcggcggcgggggcctgggcgggcccgggggttccgtccccttcaagcttgaggagaactacgacaacttctacacggtggtgactgaccgcccgctggaccgcgagacacaagacgagtacaacgtgaccatcgtggcgcgggacgggggctctcctcccctcaactccaccaagtcgttcgcgatcaagattctagacgagaacgacaacccgcctcggttcaccaaagggctctacgtgcttcaggtgcacgagaacaacatcccgggagagtacctgggctctgtgctcgcccaggatcccgacctgggccagaacggcaccgtatcctactctatcctgccctcgcacatcggcgacgtgtctatctacacctatgtgtctgtgaatcccacgaacggggccatctacgccctgcgctcctttaacttcgagcagaccaaggcttttgagttcaaggtgcttgctaaggactcgggggcgcccgcgcacttggagagcaacgccacggtgagggtgacagtgctagacgtgaatgacaacgcgccagtgatcgtgctccccacgctgcagaacgacaccgcggagctgcaggtgccgcgcaacgctggcctgggctatctggtgagcactgtgcgcgccctagacagcgacttcggcgagagcgggcgtctcacctacgagatcgtggacggcaacgacgaccacctgtttgagatcgacccgtccagcggcgagatccgcacgctgcaccctttctgggaggacgtgacgcccgtggtggagctggtggtgaaggtgaccgaccacggcaagcctaccctgtccgcagtggccaagctcatcatccgctcggtgagcggatcccttcccgagggggtaccacgggtgaatggcgagcagcaccactgggacatgtcgctgccgctcatcgtgactctgagcactatctccatcatcctcctagcggccatgatcaccatcgccgtcaagtgcaagcgcgagaacaaggagatccgcacttacaactgccgcatcgccgagtacagccacccgcagctgggtgggggcaagggcaagaagaagaagatcaacaaaaatgatatcatgctggtgcagagcgaagtggaggagaggaacgccatgaacgtcatgaacgtggtgagcagcccctccctggccacctcccccatgtacttcgactaccagacccgcctgcccctcagctcgccccggtcggaggtgatgtatctcaaaccggcctccaacaacctgactgtccctcaggggcacgcgggctgccacaccagcttcaccggacaagggactaatgcaagcgagacccctgccactcggatgtccataattcagacagacaattttcccgcagagcccaattacatgggcagcaggcagcagtttgttcaaagtatttcagtagctccacgtttaaggacccagaaagagccagcctgagagacagtgggcacggggacagtgatcaggctgacagtgaccaagacactaacaaaggctcctgctgtgacatgtctgttagggaggcactcaagatgaaaactacttcaactaaaagccaaccacttgaacaagaaccagaagagtgtgttaattgcacagatgaatgccgagtgcttggtcattctgacaggtgctggatgccacagttccctgcagccaatcaggctgaaaatgcagattaccgcacaaatctctttgtacctacagttgaagctaatgttgagactgagacttacgaaactgtgaatcccactgggaaaaagactttttgtacatttggaaaagacaagcgagagcacactattctcattgccaacgttaaaccttatttaaaagccaaacgtgccctgagccctctcctccaagaggtcccctcagcatcaagcagcccaaccaaggcgtgcatcgagccttgcacctcaacaaaaggctccctggatggctgtgaagcaaaaccaggagccctggctgaagcaagcagtcagtacttgcccactgacagtcaatatctgtcacctagtaagcaaccaagagaccctcccttcatggcttccgatcagatggcaagggtctttgcagatgtgcattccagagccagccgggattccagtgagatgggtgctgttcttgagcagcttgaccaccccaacagggatctgggcagagagtctgtggatgcagaggaagttgtgagagaaattgataagcttttgcaagactgccggggaaacgaccctgtggctgtgagaaagtgaaaaaagaaaaaaaaaaaggcattggcattttcttgtctcttctgttgatttaaaaatgatccctcctggtgataacccattttacagggatgaagaaagaccaatgctgctttaaggcttttagtgaacatctgaagtgcccacaagtatgttctttccactgctgatttctttttcagagataacaatggtttcgttttgaccaaacttgtattaggacagaattaatgatgcttaaagagaaaagaaaaaaagagagaagaaaaaggagagatgaaaaaggaggatgaggagaagaattaccttttgacaatctgttaggaaggtatgcagtgtgagaactgaagtatttctgatcactctcagactgtcctccgtgatttatgctgacttaactgtttacctataaaccccatacaaagcagggtcataatttgtgatctgtggtggatttctagcagtcatcacaggcttctactgaaagtcctgaaaagaccttgcagtagtccaagctacaccaaacattaacacatatttgtggtaaacatttctgtataaagttacctgacacacatataaacacaaggaacattccatatcattagtcgaaaacaaaaacaaaaaaaaaacctttggtcatttgtaagacatctcatgtcatataaaagttaaatgtaaaaagatacagtccattttgtcctgcacacacgtagactaattcacgtcaaaaaaaaaaaaaaa

SEQ ID NO: 32 - protein, 889 aa, Homo sapiens
MYLSICCCFLLWAPALTLKNLNYSVPEEQGAGTVIGNIGRDARLQPGLPPAERGGGGRSKSGSYRVLENSAPHLLDVDADSGLLYTKQRIDRESLCRHNAKCQLSLEVFANDKEICMIKVEIQDINDNAPSFSSDQIEMDISENAAPGTRFPLTSAHDPDAGENGLRTYLLTRDDHGLFGLDVKSRGDGTKFPELVIQKALDREQQNHHTLVLTALDGGEPPRSATVQINVKVIDSNDNSPVFEAPSYLVELPENAPLGTVVIDLNATDADEGPNGEVLYSFSSYVPDRVRELFSIDPKTGLIRVKGNLDYEENGMLEIDVQARDLGPNPIPAHCKVTVKLIDRNDNAPSIGFVSVRQGALSEAAPPGTVIALVRVTDRDSGKNGQLQCRVLGGGGTGGGGGLGGPGGSVPFKLEENYDNFYTVVTDRPLDRETQDEYNVTIVARDGGSPPLNSTKSFAIKILDENDNPPRFTKGLYVLQVHENNIPGEYLGSVLAQDPDLGQNGTVSYSILPSHIGDVSIYTYVSVNPTNGAIYALRSFNFEQTKAFEFKVLAKDSGAPAHLESNATVRVTVLDVNDNAPVIVLPTLQNDTAELQVPRNAGLGYLVSTVRALDSDFGESGRLTYEIVDGNDDHLFEIDPSSGEIRTLHPFWEDVTPVVELVVKVTDHGKPTLSAVAKLIIRSVSGSLPEGVPRVNGEQHHWDMSLPLIVTLSTISIILLAAMITIAVKCKRENKEIRTYNCRIAEYSHPQLGGGKGKKKKINKNDIMLVQSEVEERNAMNVMNVVSSPSLATSPMYFDYQTRLPLSSPRSEVMYLKPASNNLTVPQGHAGCHTSFTGQGTNASETPATRMSIIQTDNFPAEPNYMGSRQQFVQSISVAPRLRTQKEPA

SEQ ID NO: 33 - DNA, 733 bp, Homo sapiens
aaacagcaggaaatagaaacttaagagaaatacacacttctgagaaactgaaacgacaggggaaaggaggtctcactgagcaccgtcccagcatccggacaccacagcggcccttcgctccacgcagaaaaccacacttctcaaaccttcactcaacacttccttccccaaagccagaagatgcacaaggaggaacatgaggtggctgtgctgggggcaccccccagcaccatccttccaaggtccaccgtgatcaacatccacagcgagacctccgtgcccgaccatgtcgtctggtccctgttcaacaccctcttcttgaactggtgctgtctgggcttcatagcattcgcctactccgtgaagtctagggacaggaagatggttggcgacgtgaccggggcccaggcctatgcctccaccgccaagtgcctgaacatctgggccctgattctgggcatcctcatgaccattggattcatcctgttactggtattcggctctgtgacagtctaccatattatgttacagataatacaggaaaaacggggttactagtagccgcccatagcctgcaacctttgcactccactgtgcaatgctggccctgcacgctggggctgttgcccctgcccccttggtcctgcccctagatacagcagtttatacccacacacctgtctacagtgtcattcaataaagtgcacgtgcttgtgaaaaaaaaaaaaaaaaa

SEQ ID NO: 34 - protein, 125 aa, Homo sapiens
MHKEEHEVAVLGAPPSTILPRSTVINIHSETSVPDHVVWSLFNTLFLNWCCLGFIAFAYSVKSRDRKMVGDVTGAQAYASTAKCLNIWALILGILMTIGFILLLVFGSVTVYHIMLQIIQEKRGY

SEQ ID NO: 35 - DNA, 894 bp, Homo sapiens
gcccgtcttcgtgtctcctccctccctcgccttcctccttcctagctcctctcctccagggccagactgagcccaggttgatttcaggcggacaccaatagactccacagcagctccaggagcccagacaccggcggccagaagcaaggctaggagctgctgcagccatgtcggccctcagcctcctcattctgggcctgctcacggcagtgccacctgccagctgtcagcaaggcctggggaaccttcagccctggatgcagggccttatcgcggtggccgtgttcctggtcctcgttgcaatcgcctttgcagtcaaccacttctggtgccaggaggagccggagcctgcacacatgatcctgaccgtcggaaacaaggcagatggagtcctggtgggaacagatggaaggtactcttcgatggcggccagtttcaggtccagtgagcatgagaatgcctatgagaatgtgcccgaggaggaaggcaaggtccgcagcaccccgatgtaaccttctctgtggctccaaccccaagactcccaggcacatgggatggatgtccagtgctaccacccaagccccctccttctttgtgtggaatctgcaatagtgggctgactccctccagccccatgccggccctacccgcccttgaagtatagccagccaaggttggagctcagaccgtgtctaggttggggctcggctgtggccctggggtctcctgctcagctcagaagagccttctggagaggacagtcagctgagcacctcccatcctgctcacacgtccttccccataactatggaaatggccctaatttctgtgaaataaagactttttgtatttctggggctgaggctcagcaacagcccctcaggcttccagtga

SEQ ID NO: 36 - protein, 114 aa, Homo sapiens
MSALSLLILGLLTAVPPASCQQGLGNLQPWMQGLIAVAVFLVLVAIAFAVNHFWCQEEPEPAHMILTVGNKADGVLVGTDGRYSSMAASFRSSEHENAYENVPEEEGKVRSTPM

SEQ ID NO: 37 - DNA, 5395 bp, Homo sapiens
aattcactaatgcattctgctctttttgagagcacagcttctcagatgtgctccttggagctggtgtgcagtgtcctgactgtaagatcaagtccaaacctgttttggaattgaggaaacttctcttttgatctcagcccttggtggtccaggtcttcatgctgctgtgggtgatattactggtcctggctcctgtcagtggacagtttgcaaggacacccaggcccattattttcctccagcctccatggaccacagtcttccaaggagagagagtgaccctcacttgcaagggatttcgcttctactcaccacagaaaacaaaatggtaccatcggtaccttgggaaagaaatactaagagaaaccccagacaatatccttgaggttcaggaatctggagagtacagatgccaggcccagggctcccctctcagtagccctgtgcacttggatttttcttcagcttcgctgatcctgcaagctccactttctgtgtttgaaggagactctgtggttctgaggtgccgggcaaaggcggaagtaacactgaataatactatttacaagaatgataatgtcctggcattccttaataaaagaactgacttccatattcctcatgcatgtctcaaggacaatggtgcatatcgctgtactggatataaggaaagttgttgccctgtttcttccaatacagtcaaaatccaagtccaagagccatttacacgtccagtgctgagagccagctccttccagcccatcagcgggaacccagtgaccctgacctgtgagacccagctctctctagagaggtcagatgtcccgctccggttccgcttcttcagagatgaccagaccctgggattaggctggagtctctccccgaatttccagattactgccatgtggagtaaagattcagggttctactggtgtaaggcagcaacaatgccttacagcgtcatatctgacagcccgagatcctggatacaggtgcagatccctgcatctcatcctgtcctcactctcagccctgaaaaggctctgaattttgagggaaccaaggtgacacttcactgtgaaacccaggaagattctctgcgcactttgtacaggttttatcatgagggtgtccccctgaggcacaagtcagtccgctgtgaaaggggagcatccatcagcttctcactgactacagagaattcagggaactactactgcacagctgacaatggccttggcgccaagcccagtaaggctgtgagcctctcagtcactgttcccgtgtctcatcctgtcctcaacctcagctctcctgaggacctgatttttgagggagccaaggtgacacttcactgtgaagcccagagaggttcactccccatcctgtaccagtttcatcatgagggtgctgccctggagcgtaggtcggccaactctgcaggaggagtggccatcagcttctctctgactgcagagcattcagggaactactactgcacagctgacaatggctttggcccccagcgcagtaaggcggtgagcctctccgtcactgtccctgtgtctcatcctgtcctcaccctcagctctgctgaggccctgacttttgaaggagccactgtgacacttcactgtgaagtccagagaggttccccacaaatcctataccagttttatcatgaggacatgcccctgtggagcagctcaacaccctctgtgggaagagtgtccttcagcttctctctgactgaaggacattcagggaattactactgcacagctgacaatggctttggtccccagcgcagtgaagtggtgagcctttttgtcactgttccagtgtctcgccccatcctcaccctcagggttcccagggcccaggctgtggtgggggacctgctggagcttcactgtgaggccccgagaggctctcccccaatcctgtactggttttatcatgaggatgtcaccctggggagcagctcagccccctctggaggagaagcttctttcaacctctctctgactgcagaacattctggaaactactcatgtgaggccaacaatggcctagtggcccagcacagtgacacaatatcactcagtgttatagttccagtatctcgtcccatcctcaccttcagggctcccagggcccaggctgtggtgggggacctgctggagcttcactgtgaggccctgagaggctcctccccaatcctgtactggttttatcatgaagatgtcaccctgggtaagatctcagccccctctggaggaggggcctccttcaacctctctctgactacagaacattctggaatctactcctgtgaggcagacaatggtctggaggcccagcgcagtgagatggtgacactgaaagttgcagttccggtgtctcgcccggtcctcaccctcagggctcccgggacccatgctgcggtgggggacctgctggagcttcactgtgaggccctgagaggctctcccctgatcctgtaccggttttttcatgaggatgtcaccctaggaaataggtcgtccccctctggaggagcgtccttaaacctctctctgactgcagagcactctggaaactactcctgtgaggccgacaatggcctcggggcccagcgcagtgagacagtgacactttatatcacagggctgaccgcgaacagaagtggcccttttgccacaggagtcgccgggggcctgctcagcatagcaggccttgctgcgggggcactgctgctctactgctggctctcgagaaaagcagggagaaagcctgcctctgaccccgccaggagcccttcagactcggactcccaagagcccacctatcacaatgtaccagcctgggaagagctgcaaccagtgtacactaatgcaaatcctagaggagaaaatgtggtttactcagaagtacggatcatccaagagaaaaagaaacatgcagtggcctctgaccccaggcatctcaggaacaagggttcccctatcatctactctgaagttaaggtggcgtcaaccccggtttccggatccctgttcttggcttcctcagctcctcacagatgagtccacacgtctctccaactgctgtttcagcctctgcaccccaaagttccccttgggggagaagcagcattgaagtgggaagatttaggctgccccagaccatatctactggcctttgtttcacatgtcctcattctcagtctgaccagaatgcagggccctgctggactgtcacctgtttcccagttaaagccctgactggcaggttttttaatccagtggcaaggtgctcccactccagggcccagcacatctcctggattccttagtgggcttcagctgtggttgctgttctgagtactgctctcatcacacccccacagagggggtcttaccacacaaagggagagtgggccttcaggagatgccgggctggcctaacagctcaggtgctcctaaactccgacacagagttcctgctttgggtggatgcatttctcaattgtcatcagcctggtggggctactgcagtgtgctgccaaatgggacagcacacagcctgtgcacatgggacatgtgatgggtctccccacgggggctgcatttcacactcctccacctgtctcaaactctaaggtcggcacttgacaccaaggtaacttctctcctgctcatgtgtcagtgtctacctgcccaagtaagtggctttcatacaccaagtcccaagttcttcccatcctaacagaagtaacccagcaagtcaaggccaggaggaccaggggtgcagacagaacacatactggaacacaggaggtgctcaattactatttgactgactgactgaatgaatgaatgaatgaggaagaaaactgtgggtaatcaaactggcataaaatccagtgcactccctaggaaatccgggaggtattctggcttccctaagaaacaatggaagagaaggagcttggatgaggaaactgttcagcaagaggaagggcttctcacactttcatgtgcttgtggatcacctgaggatcctgtgaaaatacagatactgattcagtgggtctgcgtagagcctgagactgccattctaacatgttcccaggggatgctgatgctgctggccctgggactgcactgcatgcatgtgaagccctataggtctcagcagaggcccatggagagggaatgtgtggctctggctgcccagggcccaactcggttcacacggatcgtgctgctccctggccagcctttggccacagcaccaccagctgctgttgctgagagagcttcttctctgtgacatgttggctttcatcagccaccctgggaagcggaaagtagctgccactatctttgtttccccacctcaggcctcacactttcccatgaaaagggtgaatgtatataacctgagccctctccattcagagttgttctcccatctctgagcaatgggatgttctgttccgcttttatgatatccatcacatcttatcttgatctttgctcccagtggattgtacagtgatgacttttaagccccacggccctgaaataaaatccttccaagggcattggaagctcactccacctgaaccatggcttttcatgcttccaagtgtcagggccttgcccagatagacagggctggctctgctgccccaacctttcaaggaggaaaccagacacctgagacaggagcctgtatgcagcccagtgcagccttgcagaggacaaggctggaggcatttgtcatcactacagatatgcaactaaaatagacgtggagcaagagaaatgcattcccaccgaggccgcttttttaggcctagttgaaagtcaagaaggacagcagcaagcataggctcaggattaaagaaaaaaatctgctcacagtctgttctggaggtcacatcaccaacaaagctcacgccctatgcagttctgagaaggtggaggcaccaggctcaaaagaggaaatttagaatttctcattgggagagtaaggtacccccatcccagaatgataactgcacagtggcagaacaaactccaccctaatgtgggtggaccccgtccagtctgttgaaggcctgaatgtaacaaaagggcttattcttcctcaagtaagggggaactcctgctttgggctgggacataagtttttctgctttcagacgcaaactgaaaaatggctcttcttgggtcttgagcttgctggcatatggactgaaagaaactatgctattggatctcctggatctccagcttgctgactgcagatcttgagatatgtcagcctctacagtcacaagagctaattcattctaataaaccaatctttctgtaaaaaa

SEQ ID NO: 38 - protein, 977 aa, Homo sapiens
MLLWVILLVLAPVSGQFARTPRPIIFLQPPWTTVFQGERVTLTCKGFRFYSPQKTKWYHRYLGKEILRETPDNILEVQESGEYRCQAQGSPLSSPVHLDFSSASLILQAPLSVFEGDSVVLRCRAKAEVTLNNTIYKNDNVLAFLNKRTDFHIPHACLKDNGAYRCTGYKESCCPVSSNTVKIQVQEPFTRPVLRASSFQPISGNPVTLTCETQLSLERSDVPLRFRFFRDDQTLGLGWSLSPNFQITAMWSKDSGFYWCKAATMPYSVISDSPRSWIQVQIPASHPVLTLSPEKALNFEGTKVTLHCETQEDSLRTLYRFYHEGVPLRHKSVRCERGASISFSLTTENSGNYYCTADNGLGAKPSKAVSLSVTVPVSHPVLNLSSPEDLIFEGAKVTLHCEAQRGSLPILYQFHHEGAALERRSANSAGGVAISFSLTAEHSGNYYCTADNGFGPQRSKAVSLSVTVPVSHPVLTLSSAEALTFEGATVTLHCEVQRGSPQILYQFYHEDMPLWSSSTPSVGRVSFSFSLTEGHSGNYYCTADNGFGPQRSEVVSLFVTVPVSRPILTLRVPRAQAVVGDLLELHCEAPRGSPPILYWFYHEDVTLGSSSAPSGGEASFNLSLTAEHSGNYSCEANNGLVAQHSDTISLSVIVPVSRPILTFRAPRAQAVVGDLLELHCEALRGSSPILYWFYHEDVTLGKISAPSGGGASFNLSLTTEHSGIYSCEADNGLEAQRSEMVTLKVAVPVSRPVLTLRAPGTHAAVGDLLELHCEALRGSPLILYRFFHEDVTLGNRSSPSGGASLNLSLTAEHSGNYSCEADNGLGAQRSETVTLYITGLTANRSGPFATGVAGGLLSIAGLAAGALLLYCWLSRKAGRKPASDPARSPSDSDSQEPTYHNVPAWEELQPVYTNANPRGENVVYSEVRIIQEKKKHAVASDPRHLRNKGSPIIYSEVKVASTPVSGSLFLASSAPHR

SEQ ID NO: 39 - DNA, 3457 bp, Homo sapiens
gggacgcccgggcggccctgaaggggacggggcggccccagtcggaggtcgcagggagctccgcccccgactcggtataagagctgggcccggcccacggcggcggcggcggcggcggagagagctggctcagggcgtccgctaggctcggacgacctgctgagcctcccaaaccgcttccataaggctttgcctttccaacttcagctacagtgttagctaagtttggaaagaaggaaaaaagaaaatccctgggccccttttcttttgttctttgccaaagtcgtcgttgtagtctttttgcccaaggctgttgtgtttttagaggtcctatctccagttccttgcactcctgttaacaagcacctcagcgagagcagcagcagcgatagcagccgcagaagagccagcggggtcgcgtagtgtcatgaccagggcgggagatcacaaccgccagagaggatgctgtggatccttggccgactacctgacctctgcaaaattccttctctaccttggtcattctctctctacttggggagatcggatgtggcactttgcggtgtctgtgtttctggtagagctctatggaaacagcctccttttgacagcagtctacgggctggtggtggcagggtctgttctggtcctgggagccatcatcggtgactgggtggacaagaatgctagacttaaagtggcccagacctcgctggtggtacagaatgtttcagtcatcctgtgtggaatcatcctgatgatggttttcttacataaacatgagcttctgaccatgtaccatggatgggttctcacttcctgctatatcctgatcatcactattgcaaatattgcaaatttggccagtactgctactgcaatcacaatccaaagggattggattgttgttgttgcaggagaagacagaagcaaactagcaaatatgaatgccacaatacgaaggattgaccagttaaccaacatcttagcccccatggctgttggccagattatgacatttggctccccagtcatcggctgtggctttatttcgggatggaacttggtatccatgtgcgtggagtacgttctgctctggaaggtttaccagaaaaccccagctctagctgtgaaagctggtcttaaagaagaggaaactgaattgaaacagctgaatttacacaaagatactgagccaaaacccctggagggaactcatctaatgggtgtgaaagactctaacatccatgagcttgaacatgagcaagagcctacttgtgcctcccagatggctgagcccttccgtaccttccgagatggatgggtctcctactacaaccagcctgtgtttctggctggcatgggtcttgctttcctttatatgactgtcctgggctttgactgcatcaccacagggtacgcctacactcagggactgagtggttccatcctcagtattttgatgggagcatcagctataactggaataatgggaactgtagcttttacttggctacgtcgaaaatgtggtttggttcggacaggtctgatctcaggattggcacagctttcctgtttgatcttgtgtgtgatctctgtattcatgcctggaagccccctggacttgtccgtttctccttttgaagatatccgatcaaggttcattcaaggagagtcaattacacctaccaagatacctgaaattacaactgaaatatacatgtctaatgggtctaattctgctaatattgtcccggagacaagtcctgaatctgtgcccataatctctgtcagtctgctgtttgcaggcgtcattgctgctagaatcggtctttggtcctttgatttaactgtgacacagttgctgcaagaaaatgtaattgaatctgaaagaggcattataaatggtgtacagaactccatgaactatcttcttgatcttctgcatttcatcatggtcatcctggctccaaatcctgaagcttttggcttgctcgtattgatttcagtctcctttgtggcaatgggccacattatgtatttccgatttgcccaaaatactctgggaaacaagctctttgcttgcggtcctgatgcaaaagaagttaggaaggaaaatcaagcaaatacatctgttgtttgagacagtttaactgttgctatcctgttactagattatatagagcacatgtgcttattttgtactgcagaattccaataaatggctgggtgttttgctctgtttttaccacagctgtgccttgagaactaaaagctgtttaggaaacctaagtcagcagaaattaactgattaatttcccttatgttgaggcatggaaaaaaaattggaaaagaaaaactcagtttaaatacggagactataatgataacactgaattcccctatttctcatgagtagatacaatcttacgtaaaagagtggttagtcacgtgaattcagttatcatttgacagattcttatctgtactagaattcagatatgtcagttttctgcaaaactcactcttgttcaagactagctaatttatttttttgcatcttagttatttttaaaaacaaattcttcaagtatgaagactaaattttgataactaatattatccttattgatcctattgatcttaaggtatttacatgtatgtggaaaaacaaaacacttaactagaattctctaataaggtttatggtttagcttaaagagcacctttgtatttttattatcagatggggcaacatattgtatgaagcatatgtagcacttcacagcatggttatcatgtaagctgcaggtagaagcacacactcaggtagaatatttttatttttactgttttatacccagaagttatttctacattaagctgtaaagtagatttatcacacaatgactgcatacagacttcaaatatgtcaatagtttggtcatagaacctagaagccaaaagccacacagaagggcaagaatcccaatttaactcatgttatcatcattagtgatctgtgttgtagaacatgagggtgtaagccttcagcctggcaagttacatgtagaaagcccacacttgtgaaggttttgttttacaaatcacttgatttaagttctacagcaagaatattcataaaagtatccctttcaaatgcctttgagaagaatagaagaaaaaaagtttgtatatattttaaaaaattgttttaaaagtcagtttgcaacatgtctgtaccaagatggtactttgccttaaccgtttatatgcactttcatggagactgcaatacgttgctatgagcactttctttatccttggagtttaatcctttgcttcatctttctacagtatgacataatgatttgctatgttgtaaaatctttgtaaaaaatttctatataaaaatattttgaaaatcttaaaaaaaaaaaaaaaaaaaaaaaaaaaa

SEQ ID NO: 40 - protein, 571 aa, Homo sapiens
MTRAGDHNRQRGCCGSLADYLTSAKFLLYLGHSLSTWGDRMWHFAVSVFLVELYGNSLLLTAVYGLVVAGSVLVLGAIIGDWVDKNARLKVAQTSLVVQNVSVILCGIILMMVFLHKHELLTMYHGWVLTSCYILIITIANIANLASTATAITIQRDWIVVVAGEDRSKLANMNATIRRIDQLTNILAPMAVGQIMTFGSPVIGCGFISGWNLVSMCVEYVLLWKVYQKTPALAVKAGLKEEETELKQLNLHKDTEPKPLEGTHLMGVKDSNIHELEHEQEPTCASQMAEPFRTFRDGWVSYYNQPVFLAGMGLAFLYMTVLGFDCITTGYAYTQGLSGSILSILMGASAITGIMGTVAFTWLRRKCGLVRTGLISGLAQLSCLILCVISVFMPGSPLDLSVSPFEDIRSRFIQGESITPTKIPEITTEIYMSNGSNSANIVPETSPESVPIISVSLLFAGVIAARIGLWSFDLTVTQLLQENVIESERGIINGVQNSMNYLLDLLHFIMVILAPNPEAFGLLVLISVSFVAMGHIMYFRFAQNTLGNKLFACGPDAKEVRKENQANTSVV

SEQ ID NO: 41 - DNA, 2213 bp, Homo sapiens
gctctagaactagtggatcccccgggctgcaggaattctctaaagaagcccctgggagcacagctcatcaccatggactggacctggaggttcctctttgtggtggcagcagctacaggtgtccagtcccaggtgcagctggtgcagtctggggctgaggtgaagaagcctgggtcctcggtgaaggtctcctgcaaggcttctggaggcaccttcagcagctatgctatcagctgggtgcgacaggcccctggacaagggcttgagtggatgggagggatcatccctatctttggtacagcaaactacgcacagaagttccagggcagagtcacgattaccgcggacgaatccacgagcacagcctacatggagctgagcagcctgagatctgaggacacggccgtgtattactgtgcgaaaaccgggatcctggggccgtatagcagtggctggtacccgaactcggactactactactacggtatggacgtctggggccaagggaccacggtcaccgtctcctcagggagtgcatccgccccaacccttttccccctcgtctcctgtgagaattccccgtcggatacgagcagcgtggccgttggctgcctcgcacaggacttccttcccgactccatcactttctcctggaaatacaagaacaactctgacatcagcagcacccggggcttcccatcagtcctgagagggggcaagtacgcagccacctcacaggtgctgctgccttccaaggacgtcatgcagggcacagacgaacacgtggtgtgcaaagtccagcaccccaacggcaacaaagaaaagaacgtgcctcttccagtgattgctgagctgcctcccaaagtgagcgtcttcgtcccaccccgcgacggcttcttcggcaacccccgcagcaagtccaagctcatctgccaggccacgggtttcagtccccggcagattcaggtgtcctggctgcgcgaggggaagcaggtggggtctggcgtcaccacggaccaggtgcaggctgaggccaaagagtctgggcccacgacctacaaggtgaccagcacactgaccatcaaagagagcgactggctcagccagagcatgttcacctgccgcgtggatcacaggggcctgaccttccagcagaatgcgtcctccatgtgtgtccccgatcaagacacagccatccgggtcttcgccatccccccatcctttgccagcatcttcctcaccaagtccaccaagttgacctgcctggtcacagacctgaccacctatgacagcgtgaccatctcctggacccgccagaatggcgaagctgtgaaaacccacaccaacatctccgagagccaccccaatgccactttcagcgccgtgggtgaggccagcatctgcgaggatgactggaattccggggagaggttcacgtgcaccgtgacccacacagacctgccctcgccactgaagcagaccatctcccggcccaagggggtggccctgcacaggcccgatgtctacttgctgccaccagcccgggagcagctgaacctgcgggagtcggccaccatcacgtgcctggtgacgggcttctctcccgcggacgtcttcgtgcagtggatgcagagggggcagcccttgtccccggagaagtatgtgaccagcgccccaatgcctgagccccaggccccaggccggtacttcgcccacagcatcctgaccgtgtccgaagaggaatggaacacgggggagacctacacctgcgtggtggcccatgaggccctgcccaacagggtcaccgagaggaccgtggacaagtccaccgagggggaggtgagcgccgacgaggagggctttgagaacctgtgggccaccgcctccaccttcatcgtcctcttcctcctgagcctcttctacagtaccaccgtcaccttgttcaaggtgaaatgatcccaacagaagaacatcggagaccagagagaggaactcaaaggggcgctgcctccgggtctggggtcctggcctgcgtggcctgttggcacgtgtttctcttcccgcccggcctccagttgtgtgctctcacacaggcttccttctcgaccggcaggggctggctggcttgcaggccacgaggtgggctctaccccacactgctttgctgtgtatacgcttgttgccctgaaataaatatgcacattttatccatg

SEQ ID NO: 42 - protein, 627 aa, Homo sapiens [sequence omitted]

SEQ ID NO: 43 - DNA, 947 bp, Homo sapiens
ccatccctgagatctttttataaaaaacccagtctttgctgaccagacaaagcataccagatctcaccagagagtcctaggggactacagaaggaaaaagacaagaggcagtaggatatctgtgtgtcctcccgctgaccacacttcctttagtgacccgattgcctcctcaagtcgcagacactatgctgcctcccatggccctgcccagtgtgtcctggatgctgctttcctgcctcattctcctgtgtcaggttcaaggtgaagaaacccagaaggaactgccctctccacggatcagctgtcccaaaggctccaaggcctatggctccccctgctatgccttgtttttgtcaccaaaatcctggatggatgcagatctggcttgccagaagcggccctctggaaaactggtgtctgtgctcagtggggctgagggatccttcgtgtcctccctggtgaggagcattagtaacagctattcatacatctggattgggctccatgaccccacacagggctctgagcctgatggagatggatgggagtggagtagcactgatgtgatgaattactttgcatgggagaaaaatccctccaccatcttaaaccctggccactgtgggagcctgtcaagaagcacaggatttctgaagtggaaagattataactgtgatgcaaagttaccctatgtctgcaagttcaaggactagggcaggtgggaagtcagcagcctgagcttggcgtgcagctcatcatggacatgagaccagtgtgaagactcaccctggaagagaatattctccccaaactgccctacctgactaccttgtcatgatcctccttctttttcctttttcttcaccttcatttcaggcttttctctgtcttccatgtcttgagatctcagagaataataataaaaatgttactttatacgtaaaaaa

SEQ ID NO: 44 - protein, 175 aa, Homo sapiens
MLPPMALPSVSWMLLSCLILLCQVQGEETQKELPSPRISCPKGSKAYGSPCYALFLSPKSWMDADLACQKRPSGKLVSVLSGAEGSFVSSLVRSISNSYSYIWIGLHDPTQGSEPDGDGWEWSSTDVMNYFAWEKNPSTILNPGHCGSLSRSTGFLKWKDYNCDAKLPYVCKFKD

SEQ ID NO: 45 - DNA, 3033 bp, Homo sapiens
aacacaactggcacatctcttttctcatctcttgaaaaaaaccaacagagaaaaaagtaccttgagaataaaggtaatgattaatctgtcaggcacaaaagggattgttttggggatttcgggttctaagtcgcagattcaaacaaatagcagcgaacagggaatgacagttccaccagaagacgattaagccacagcctctaattggaacggcatttgtacagtcagagactcttaccagacatctccaggaatctgtgagccattgtcaaaacgtccattttcatctggctgtgaaagtgaggaccacaacaggtaggtattggtagaaacaggagtcctcagagaagccccaagatgcagcctgagggagcagaaaagggaaaaagcttcaagcagagactggtcttgaagagcagcttagcgaaagaaaccctctctgagttcttgggcacgttcatcttgattgtccttggatgtggctgtgttgcccaagctattctcagtcgaggacgttttggaggggtcatcactatcaatgttggattttcaatggcagttgcaatggccatttatgtggctggcggtgtctctggtggtcacatcaacccagctgtgtctttagcaatgtgtctctttggacggatgaaatggttcaaattgccattttatgtgggagcccagttcttgggagcctttgtgggggctgcaaccgtctttggcatttactatgatggacttatgtcctttgctggtggaaaactgctgatcgtgggagaaaatgcaacagcacacatttttgcaacatacccagctccgtatctatctctggcgaacgcatttgcagatcaagtggtggccaccatgatactcctcataatcgtctttgccatctttgactccagaaacttgggagcccccagaggcctagagcccattgccatcggcctcctgattattgtcattgcttcctccctgggactgaacagtggctgtgccatgaacccagctcgagacctgagtcccagacttttcactgccttggcaggctgggggtttgaagtcttcagagctggaaacaacttctggtggattcctgtagtgggccctttggttggtgctgtcattggaggcctcatctatgttcttgtcattgaaatccaccatccagagcctgactcagtctttaagacagaacaatctgaggacaaaccagagaaatatgaactcagtgtcatcatgtagtggcatgctcagctctggatttgcagtcagtttgggattctcttcagaaagatggcatctaagtgtctgtgttcttgtaagcctgaggtggaatccacccagttttgtctgctagccatatgggacatctaattggaaaagcatctgcataaaagtttggaaacaatgaccacttctctaccattgtcccccacccccaccccccagaataacgctgactgtcccctgaaacagccttctctcctgccctgtttatttcatcctcgatgggaattcttgctaggtaagcactaataactcggcatcttgacgatagtcccatttgggtggtttcagctgcactatctgtatgaaatggtgtcaccaaaacccttttcttcagtatcgacaaagattacattctgagtaccaaccaaaccctaaattgaaagacaaaactatggtttcagtcaacatattcatgaattagggagctaatgggttaagcttccagttcccgctatgctactggatttgtataaatactgatattctccaaacctagtggtgtagggagcaagagaatgcagctggaaggcacaaggggaggacattgtggcattcagaaactgcaggagacaagatgaatttgagaagccaaatggaatttttaatggaaaccatttatcagattaatctcttgctctcctgcattttagaggacaccaattaatttcctggtctttagtatataataacctaaaataccattgtaacctcagtcatgaaaaatacatcactctgtctttttagctcaaatgtattttcctaattgcccacttgagaacagacatttgacaagttatatcaacgactgtgcttgtccattattttacacatgccctagaagccaaaactgaaagccactggatcctggtctagctgaatcttcagagtgggaggtctccaaaaagatattaccttattgggcttaacaattcacaaggcactttcacacccattatctaatttaatcctcataatgactatgtgaggcaaatgccacattgcccatttttcagataaagaaacaaaatcttagggaagataagttgagttgtccaagagcacactgaaagttgaatgttatctaatgcattcctctacctttcagaagatcagtagctggctgagaatctttgccaaatcttccttgctagccagaagtggaattggcagcttctagaatatgtacacctctggacaaaatgttcctcaatcttaagatacaaagaccctcattgtctgggtctattcccacacttactgagtacagatgaaggaaagtggtagcaatttaatcataactttcatttgctgaaaaacattatgagaaggcctcccttcctaagccacctctggtcttgctaagtcttgatcttgcttcctgccagcaccaaacattacattcaggggatttcctctggctcagtcttttccccttgaagttctctaatagatgttacttttgacaaaagatcgcctatgagttacaagcaccaggggatgctctacatcaagggatgcaccttcagtcaaactgtcaaaaagcccagaattcccaaaggcattaggtttcccaactgctttgtgctgatatcagaacagcagaaattaaatgtgaaatgtttctgatgacttatgttctacaatctatggacatacgggatttttttttcttgctttgaagctacctggatatttcctatttgaaataaaattgttcggtcattgttgaaaaaaaaaaaa

SEQ ID NO: 46 - protein, 295 aa, Homo sapiens
MQPEGAEKGKSFKQRLVLKSSLAKETLSEFLGTFILIVLGCGCVAQAILSRGRFGGVITINVGFSMAVAMAIYVAGGVSGGHINPAVSLAMCLFGRMKWFKLPFYVGAQFLGAFVGAATVFGIYYDGLMSFAGGKLLIVGENATAHIFATYPAPYLSLANAFADQVVATMILLIIVFAIFDSRNLGAPRGLEPIAIGLLIIVIASSLGLNSGCAMNPARDLSPRLFTALAGWGFEVFRAGNNFWWIPVVGPLVGAVIGGLIYVLVIEIHHPEPDSVFKTEQSEDKPEKYELSVIM

SEQ ID NO: 47 - DNA, 2844 bp, Homo sapiens
atgaggcccggcctctcatttctcctagcccttctgttcttccttggccaagctgcaggggatttgggggatgtgggacctccaattcccagccccggcttcagctctttcccaggtgttgactccagctccagcttcagctccagctccaggtcgggctccagctccagccgcagcttaggcagcggaggttctgtgtcccagttgttttccaatttcaccggctccgtggatgaccgtgggacctgccagtgctctgtttccctgccagacaccacctttcccgtggacagagtggaacgcttggaattcacagctcatgttctttctcagaagtttgagaaagaactttccaaagtgagggaatatgtccaattaattagtgtgtatgaaaagaaactgttaaacctaactgtccgaattgacatcatggagaaggataccatttcttacactgaactggacttcgagctgatcaaggtagaagtgaaggagatggaaaaactggtcatacagctgaaggagagttttggtggaagctcagaaattgttgaccagctggaggtggagataagaaatatgactctcttggtagagaagcttgagacactagacaaaaacaatgtccttgccattcgccgagaaatcgtggctctgaagaccaagctgaaagagtgtgaggcctctaaagatcaaaacacccctgtcgtccaccctcctcccactccagggagctgtggtcatggtggtgtggtgaacatcagcaaaccgtctgtggttcagctcaactggagagggttttcttatctatatggtgcttggggtagggattactctccccagcatccaaacaaaggactgtattgggtggcgccattgaatacagatgggagactgttggagtattatagactgtacaacacactggatgatttgctattgtatataaatgctcgagagttgcggatcacctatggccaaggtagtggtacagcagtttacaacaacaacatgtacgtcaacatgtacaacaccgggaatattgccagagttaacctgaccaccaacacgattgctgtgactcaaactctccctaatgctgcctataataaccgcttttcatatgctaatgttgcttggcaagatattgactttgctgtggatgagaatggattgtgggttatttattcaactgaagccagcactggtaacatggtgattagtaaactcaatgacaccacacttcaggtgctaaacacttggtataccaagcagtataaaccatctgcttctaacgccttcatggtatgtggggttctgtatgccacccgtactatgaacaccagaacagaagagattttttactattatgacacaaacacagggaaagagggcaaactagacattgtaatgcataagatgcaggaaaaagtgcagagcattaactataacccttttgaccagaaactttatgtctataacgatggttaccttctgaattatgatctttctgtcttgcagaagccccagtaagctgtttaggagttagggtgaaagagaaaatgtttgttgaaaaaatagtcttctccacttacttagatatctgcaggggtgtctaaaagtgtgttcattttgcagcaatgtttaggtgcatagttctaccacactagagatctaggacatttgtcttgatttggtgagttctcttgggaatcatctgcctcttcaggcgcattttgcaataaagtctgtctagggtgggattgtcagaggtctaggggcactgtgggcctagtgaagcctactgtgaggaggcttcactagaagccttaaattaggaattaaggaacttaaaactcagtatggcgtctagggattctttgtacaggaaatattgcccaatgactagtcctcatccatgtagcaccactaattcttccatgcctggaagaaacctggggacttagttaggtagattaatatctggagctcctcgagggaccaaatctccaacttttttttcccctcactagcacctggaatgatgctttgtatgtggcagataagtaaatttggcatgcttatatattctacatctgtaaagtgctgagttttatggagagaggcctttttatgcattaaattgtacatggcaaataaatcccagaaggatctgtagatgaggcacctgctttttcttttctctcattgtccaccttactaaaagtcagtagaatcttctacctcataacttccttccaaaggcagctcagaagattagaaccagacttactaaccaattccaccccccaccaacccccttctactgcctactttaaaaaaattaatagttttctatggaactgatctaagattagaaaaattaattttctttaatttcattatgaacttttatttacatgactctaagactataagaaaatctgatggcagtgacaaagtgctagcatttattgttatctaataaagaccttggagcatatgtgcaacttatgagtgtatcagttgttgcatgtaatttttgcctttgtttaagcctggaacttgtaagaaaatgaaaatttaatttttttttctaggacgagctatagaaaagctattgagagtatctagttaatcagtgcagtagttggaaaccttgctggtgtatgtgatgtgcttctgtgcttttgaatgactttatcatctagtctttgtctatttttcctttgatgttcaagtcctagtctataggattggcagtttaaatgctttactcccccttttaaaataaatgattaaaatgtgctttgaaaaaaaaaaaaaaaaaaaaaaaaaaaaaaa

SEQ ID NO: 48 - protein, 510 aa, Homo sapiens
MRPGLSFLLALLFFLGQAAGDLGDVGPPIPSPGFSSFPGVDSSSSFSSSSRSGSSSSRSLGSGGSVSQLFSNFTGSVDDRGTCQCSVSLPDTTFPVDRVERLEFTAHVLSQKFEKELSKVREYVQLISVYEKKLLNLTVRIDIMEKDTISYTELDFELIKVEVKEMEKLVIQLKESFGGSSEIVDQLEVEIRNMTLLVEKLETLDKNNVLAIRREIVALKTKLKECEASKDQNTPVVHPPPTPGSCGHGGVVNISKPSVVQLNWRGFSYLYGAWGRDYSPQHPNKGLYWVAPLNTDGRLLEYYRLYNTLDDLLLYINARELRITYGQGSGTAVYNNNMYVNMYNTGNIARVNLTTNTIAVTQTLPNAAYNNRFSYANVAWQDIDFAVDENGLWVIYSTEASTGNMVISKLNDTTLQVLNTWYTKQYKPSASNAFMVCGVLYATRTMNTRTEEIFYYYDTNTGKEGKLDIVMHKMQEKVQSINYNPFDQKLYVYNDGYLLNYDLSVLQKPQ

SEQ ID NO: 49 - DNA, 586 bp, Homo sapiens
aaacactctgtgtggctcctcggctttgacagagtgcaagacgatgacttgcaaaatgtcgcagctggaacgcaacatagagaccatcatcaacaccttccaccaatactctgtgaagctggggcacccagacaccctgaaccagggggaattcaaagagctggtgcgaaaagatctgcaaaattttctcaagaaggagaataagaatgaaaaggtcatagaacacatcatggaggacctggacacaaatgcagacaagcagctgagcttcgaggagttcatcatgctgatggcgaggctaacctgggcctcccacgagaagatgcacgagggtgacgagggccctggccaccaccataagccaggcctcggggagggcaccccctaagaccacagtggccaagatcacagtggccacggccacggccacagtcatggtggccacggccacagccactaatcaggaggccaggccaccctgcctctacccaaccagggccccggggcctgttatgtcaaactgtcttggctgtggggctaggggctggggccaaataaagtctcttcctccaagtcaaaaaaaaaa

SEQ ID NO: 50 - protein, 114 aa, Homo sapiens
MTCKMSQLERNIETIINTFHQYSVKLGHPDTLNQGEFKELVRKDLQNFLKKENKNEKVIEHIMEDLDTNADKQLSFEEFIMLMARLTWASHEKMHEGDEGPGHHHKPGLGEGTP

SEQ ID NO: 51 - DNA, 3096 bp, Homo sapiens
gccagcagcctctaagagctcctagacggcctttggctttggctggcacaggggtgaaggagagccagcggcattgagtaaccaggcgaatgtgcccccaggagagttcattccaaccctcccagttcctactgctggtgggggtcccagtggcaagtgtcctccttctggcccaatgccttcgatggcactgccctagaaggctgctgggggcctgctggacactgaatggtcaagaggaaccagtgtcccagcctaccccccaactagaaaatgaggtctcaaggcagcacctgccagccacactgccagagatggttgccttctaccaggagctacacacacccactcaaggccagaccatggtccgccagttgatgcacaaactgttggtgttttcggctcgagaggtggatcaccgcggcggttgcctgatgctccaggatacaggcatctccttgctcatcccaccaggtgctgtggctgtgggccgccaggagcgggtgtctttgatcctggtgtgggacctgtcggacgccccatcgctgtcccaagcccaggggctggtaagccctgtggtggcatgtggcccccatggggcctccttcctgaagccttgcactctcacgttcaaacactgtgccgagcagcccagccatgctcgcacctacagcagcaacactaccctgctggatgccaaggtatggaggcccctggggcggccgggggcccacgcctcccgggatgagtgtcgcatccacctctcccacttcagcctctacacctgtgtgctggaggcacctgtggggcgcgaagcccgcaaatggctgcagctggccgtattctgctcaccgctggtgccaggacagtcccatctgcaactgcgtatctacttcctcaacaacacgccctgcgccctgcagtgggcactgaccaacgagcagccccatggtgggcgcctgcgtgggccctgccagctcttcgacttcaatggggctaggggcgaccagtgcctgaagctcacgtacatctcagagggttgggagaatgtggatgacagcagttgccagctggttccccatctccacatctggcatggaaagtgccccttccgctccttctgcttccggagaaaagcagccgatgagaatgaggactgttcagcactaaccaatgagatcattgtcaccatgcacaccttccaggatggcttggagaccaagtatatggaaatcctcagattccaggcatcagaggaggaatcctgggcagcgccaccacctgtttcccagccgcccccatgcaataggctgcccccagagctctttgagcagctgcggatgttattggagccaaacagcatcaccggcaatgactggcgcggactggcctcccacctggggctttgcggcatgaagatccggttcctgtcctgccagcgcagccccgcagcggccatcctggagttgtttgaggagcagaacggcagcctgcaggagctgcactacctcatgaccgtcatggagcggctagactgcgcctccgccatccagaactacctgagtgggacacacggcggcagcccaggccccgagcgcgggggcgcccgggataaccagggcctggagctggacgagaagctctgagcgcccagcgggcagggccggaggaggtgtaggggcgagaggggttgttctcctacgcctaagaggaacacagcagctgttcctggctgtgcccaccacccttcccagaaccctcggacggtgccagggccgcccgcgtcctcgccagcctcccagcagcaggcgcgcccttccggccgcgagctgtcccgcgtgcgggtcccctcctggccggcagagggcgcaggagcccaggagatggcctcagcgtggccagcctgccaaactgaccaggggacggccacggtccccgcgtgcactttagggccggtcaggccctaaagtattcactgagcacttaggaagaccgggcattgggctggtgtcatgaagaatactggaatataggaggtagggtctggagccctgacaagcacacagttcttttgcaggagtcaagatgtgctcataggagccaagggcaaactcgaaaacagccctgccctgtggttaggggaggtgggtgtggctttaggagttgagaggggaagagctgagtgcgggctggagcagcgagaatgcttcacggaggatgttggggagagaggatttgatttgccgagtggtttggagatctttaggggcgggtaggggaagagggtggctggacttaaggtaggagccgaaagtgggcatgggagcccatccccgtgggtgtgaggccggggtaggaccaggcttcccggctaggcacgcctggctggctgcctctgcctctactaacttcctttgtctctttatcctcctgcttaggccgtgtcttcctctctctctgccattttctctatcagaaaacattaaagctgagtagaaacttcaagatgatcattctggcccagcccttttatctctttatctccaatggtgtgcgttttaagtttctctgacttggtttttctgtccctgtctcccacagttgttcccgctctgcacctgtgtttcagttactctctctctctgtcttagatctttttgtttctgcctagtctctgtgccctgtctttgtgtgtttctttctctgcctgaaaccctccctcttttcccttcaggcatatgtctctaaaccaatgttatgtatcaaagactgttgaaagagacagggctactctaggaatggatgggtggggatattttccccatggatcaagatccagtttagggttgggaaataaaggatagggataaaagaggcaccccattcagtcagcagatacttattcagcacctactatgtgtttgatactgtatacaaaagacatgaatgggctgggtcctgaacagagaataaagggtttgactccaaaaaaaaaaaaaaaaaaaaaaaaaaaaaaaaaaaaaaaaaaaaaaaaaaaaaaaaaaaaaaaaaaaaaaaaaaaaaaaaaaaaaaaaaaaaaaaaaaaaaaaaaaaaaa

SEQ ID NO: 52 - protein, 518 aa, Homo sapiens
MCPQESSFQPSQFLLLVGVPVASVLLLAQCLRWHCPRRLLGACWTLNGQEEPVSQPTPQLENEVSRQHLPATLPEMVAFYQELHTPTQGQTMVRQLMHKLLVFSAREVDHRGGCLMLQDTGISLLIPPGAVAVGRQERVSLILVWDLSDAPSLSQAQGLVSPVVACGPHGASFLKPCTLTFKHCAEQPSHARTYSSNTTLLDAKVWRPLGRPGAHASRDECRIHLSHFSLYTCVLEAPVGREARKWLQLAVFCSPLVPGQSHLQLRIYFLNNTPCALQWALTNEQPHGGRLRGPCQLFDFNGARGDQCLKLTYISEGWENVDDSSCQLVPHLHIWHGKCPFRSFCFRRKAADENEDCSALTNEIIVTMHTFQDGLETKYMEILRFQASEEESWAAPPPVSQPPPCNRLPPELFEQLRMLLEPNSITGNDWRGLASHLGLCGMKIRFLSCQRSPAAAILELFEEQNGSLQELHYLMTVMERLDCASAIQNYLSGTHGGSPGPERGGARDNQGLELDEKL

SEQ ID NO: 53 - DNA, 1437 bp, Homo sapiens
attgctgatggatcagtgagcctgtgttcatgccagtgagctgctgtggctcagatactgatactttctttccaaacagcataagaagtgattgagccacaagtatactgaaggaagggctccctcgagttctggtgtgaagagataaatcaccagtcacagactatgcacccgactgctgctgttcagtccagggaaaatgaaagttggagtgctgtggctcatttctttcttcaccttcactgacggccacggtggcttcctggggaaaaatgatggcatcaaaacaaaaaaagaactcattgtgaataagaaaaaacatctaggcccagtcgaagaatatcagctgctgcttcaggtgacctatagagattccaaggagaaaagagatttgagaaattttctgaagctcttgaagcctccattattatggtcacatgggctaattagaattatcagagcaaaggctaccacagactgcaacagcctgaatggagtcctgcagtgtacctgtgaagacagctacacctggtttcctccctcatgccttgatccccagaactgctaccttcacacggctggagcactcccaagctgtgaatgtcatctcaacaacctcagccagagtgtcaatttctgtgagagaacaaagatttggggcactttcaaaattaatgaaaggtttacaaatgaccttttgaattcatcttctgctatatactccaaatatgcaaatggaattgaaattcaacttaaaaaagcatatgaaagaattcaaggttttgagtcggttcaggtcacccaatttcgaatgtcactcttgtcgcccaagttggagtgcaatggcacaatctaggctcactgcaaccctgcaacctctgcctaccgggttcaagagattcccctgcctcagcctcccaagtagctggaattacaggcacctgccaccacatccagctaactttttttgtatttttactagagacagggtttcaccatgttggccacactggtctcaaactcctgacctcaggtgatccgcctgcctcggcccccaaagtgctgggattacaggcatgagccaccacatctggcctaggaccttaaatattggaaagcatcctcaaaactgtgggtcagtgagtagaactacaaaacaatagcagtagggcagaaacttgaaagaaggcaggagatcatggtgacagtggatgggaaaaagtgagggttggggataagggttgcgggttgtcgaagggtggattttctccttcagcaactacaggagatatgatgcctcataattcggagccagaagtggggctttgggtgagatatctttgcacagataacatgtatacatcatagttcaaaacccagtagtcattgtttacagcaaataaagaaatatttagtaaattaaaaaaaaaaaaaaaa

SEQ ID NO: 54 - protein, 218 aa, Homo sapiens
MKVGVLWLISFFTFTDGHGGFLGKNDGIKTKKELIVNKKKHLGPVEEYQLLLQVTYRDSKEKRDLRNFLKLLKPPLLWSHGLIRIIRAKATTDCNSLNGVLQCTCEDSYTWFPPSCLDPQNCYLHTAGALPSCECHLNNLSQSVNFCERTKIWGTFKINERFTNDLLNSSSAIYSKYANGIEIQLKKAYERIQGFESVQVTQFRMSLLSPKLECNGTI

SEQ ID NO: 55 - DNA, 1096 bp, Homo sapiens
atggtgctcatggcgccccgaaccctcctcctgctgctctcaggggccctggccctgacccagacctgggcgcgctcccactccatgaggtatttctacaccaccatgtcccggcccggccgcggggagccccgcttcatctccgtcggctacgtggacgatacgcagttcgtgcggttcgacagcgacgccgcgagccagaggatggagccgcgggcgccgtggatggagcgggaggggccggagtattgggaccggaacacacagatctgcaaggcccaggcacagactgaacgagagaacctgcggatcgcgctccgctactacaaccagagcgagggcggttctcacaccatgcaggtgatgtatggctgcgacgtggggcccgacgggcgcttcctccgcgggtatgaacagcacgcctacgacagcaaggattacatcgctctgaacgaggacctgcgctcctggaccgcggcggacatggcagctcagatcaccaagcgcaagtgggaggcggcccgtcaggcggagcagctgagagcctacctggagggcgagttcgtggagtggctccgcagatacctggagaacgggaaggagacgctgcagcgcgcggacccccccaagacacatatgacccaccaccccatctctgaccatgaggccaccctgaggtgctgggccctgggcttctaccctgcggagatcacactgacctggcagcgggatggggaggaccagacccacacacggagctcatggagaccaggcctgcaggggatggaaccttccagaagtgggcggctgtggtggtgccttctggagaggagcagagatacacctgccatgtgcagcatgagggtctgccagagcccctcaccctgagatgggagccatcttcccagcccaccatccccatcgtgggcatcgttgctggcctggttctacttgtagctgtggtcactggagctgtggtcgctgctgtaatgtggaggaagaagagctcagatagaaaaggagggagctactctcaggctgcaagcggcaacagtgcccagggctctgatgtgtctctcacggcgtgaaagtgtga

SEQ ID NO: 56 - protein, 295 aa, Homo sapiens
MVLMAPRTLLLLLSGALALTQTWARSHSMRYFYTTMSRPGRGEPRFISVGYVDDTQFVRFDSDAASQRMEPRAPWMEREGPEYWDRNTQICKAQAQTERENLRIALRYYNQSEGGSHTMQVMYGCDVGPDGRFLRGYEQHAYDSKDYIALNEDLRSWTAADMAAQITKRKWEAARQAEQLRAYLEGEFVEWLRRYLENGKETLQRADPPKTHMTHHPISDHEATLRCWALGFYPAEITLTWQRDGEDQTHTRSSWRPGLQGMEPSRSGRLWWCLLERSRDTPAMCSMRVCQSPSP

SEQ ID NO: 57 - DNA, 2974 bp, Homo sapiens
gtgtgcgtgatggagaaaattgggcaccagggctgctcccgagattctcagatctgatttccacgcttgctaccaaaatagtctgggcaggccacttttggaagtaggcgttatctagtgagcaggcggccgctttcgatttcgctttcccctaaatggctgagcttctcgccagcgcaggatcagcctgttcctgggactttccgagagccccgccctcgttccctcccccagccgccagtaggggaggactcggcggtacccggagcttcaggccccaccggggcgcggagagtcccaggcccggccgggaccgggacggcgtccgagtgccaatggctagctctaggtgtcccgctccccgcgggtgccgctgcctccccggagcttctctcgcatggctggggacagtactgctacttctcgccgactgggtgctgctccggaccgcgctgccccgcatattctccctgctggtgcccaccgcgctgccactgctccgggtctgggcggtgggcctgagccgctgggccgtgctctggctgggggcctgcggggtcctcagggcaacggttggctccaagagcgaaaacgcaggtgcccagggctggctggctgctttgaagccattagctgcggcactgggcttggccctgccgggacttgccttgttccgagagctgatctcatggggagcccccgggtccgcggatagcaccaggctactgcactggggaagtcaccctaccgccttcgttgtcagttatgcagcggcactgcccgcagcagccctgtggcacaaactcgggagcctctgggtgcccggcggtcagggcggctctggaaaccctgtgcgtcggcttctaggctgcctgggctcggagacgcgccgcctctcgctgttcctggtcctggtggtcctctcctctcttggggagatggccattccattctttacgggccgcctcactgactggattctacaagatggctcagccgataccttcactcgaaacttaactctcatgtccattctcaccatagccagtgcagtgctggagttcgtgggtgacgggatctataacaacaccatgggccacgtgcacagccacttgcagggagaggtgtttggggctgtcctgcgccaggagacggagtttttccaacagaaccagacaggtaacatcatgtctcgggtaacagaggacacgtccaccctgagtgattctctgagtgagaatctgagcttatttctgtggtacctggtgcgaggcctatgtctcttggggatcatgctctggggatcagtgtccctcaccatggtcaccctgatcaccctgcctctgcttttccttctgcccaagaaggtgggaaaatggtaccagttgctggaagtgcaggtgcgggaatctctggcaaagtccagccaggtggccattgaggctctgtcggccatgcctacagttcgaagctttgccaacgaggagggcgaagcccagaagtttagggaaaagctgcaagaaataaagacactcaaccagaaggaggctgtggcctatgcagtcaactcctggaccactagtatttcaggtatgctgctgaaagtgggaatcctctacattggtgggcagctggtgaccagtggggctgtaagcagtgggaaccttgtcacatttgttctctaccagatgcagttcacccaggctgtggaggtactgctctccatctaccccagagtacagaaggctgtgggctcctcagagaaaatatttgagtacctggaccgcacccctcgctgcccacccagtggtctgttgactcccttacacttggagggccttgtccagttccaagatgtctcctttgcctacccaaaccgcccagatgtcttagtgctacaggggctgacattcaccctacgccctggcgaggtgacggcgctggtgggacccaatgggtctgggaagagcacagtggctgccctgctgcagaatctgtaccagcccaccgggggacagctgctgttggatgggaagccccttccccaatatgagcaccgctacctgcacaggcaggtggctgcagtgggacaagagccacaggtatttggaagaagtcttcaagaaaatattgcctatggcctgacccagaagccaactatggaggaaatcacagctgctgcagtaaagtctggggcccatagtttcatctctggactccctcagggctatgacacagaggtagacgaggctgggagccagctgtcagggggtcagcgacaggcagtggcgttggcccgagcattgatccggaaaccgtgtgtacttatcctggatgatgccaccagtgccctggatgcaaacagccagttacaggtggagcagctcctgtacgaaagccctgagcggtactcccgctcagtgcttctcatcacccagcacctcagcctggtggagcaggctgaccacatcctctttctggaaggaggcgctatccgggaggggggaacccaccagcagctcatggagaaaaaggggtgctactgggccatggtgcaggctcctgcagatgctccagaatgaaagccttctcagacctgcgcactccatctccctcccttttcttctctctgtggtggagaaccacagctgcagagtaggcagctgcctccaggatgagttacttgaaatttgccttgagtgtgttacctcctttccaagctcctcgtgataatgcagacttcctggagtacaaacacaggatttgtaattccttactgtaacggagtttagagccagggctgatgctttggtgtggccagcactctgaaactgagaaatgttcagaatgtacggaaagatgatcagctattttcaacataactgaaggcatatgctggcccataaacaccctgtaggttcttgatatttataataaaattggtgttttgtaaaaaaaaaaaaaaaaaaaaaaa

SEQ ID NO: 58 - protein, 808 aa, Homo sapiens
MAELLASAGSACSWDFPRAPPSFPPPAASRGGLGGTRSFRPHRGAESPRPGRDRDGVRVPMASSRCPAPRGCRCLPGASLAWLGTVLLLLADWVLLRTALPRIFSLLVPTALPLLRVWAVGLSRWAVLWLGACGVLRATVGSKSENAGAQGWLAALKPLAAALGLALPGLALFRELISWGAPGSADSTRLLHWGSHPTAFVVSYAAALPAAALWHKLGSLWVPGGQGGSGNPVRRLLGCLGSETRRLSLFLVLVVLSSLGEMAIPFFTGRLTDWILQDGSADTFTRNLTLMSILTIASAVLEFVGDGIYNNTMGHVHSHLQGEVFGAVLRQETEFFQQNQTGNIMSRVTEDTSTLSDSLSENLSLFLWYLVRGLCLLGIMLWGSVSLTMVTLITLPLLFLLPKKVGKWYQLLEVQVRESLAKSSQVAIEALSAMPTVRSFANEEGEAQKFREKLQEIKTLNQKEAVAYAVNSWTTSISGMLLKVGILYIGGQLVTSGAVSSGNLVTFVLYQMQFTQAVEVLLSIYPRVQKAVGSSEKIFEYLDRTPRCPPSGLLTPLHLEGLVQFQDVSFAYPNRPDVLVLQGLTFTLRPGEVTALVGPNGSGKSTVAALLQNLYQPTGGQLLLDGKPLPQYEHRYLHRQVAAVGQEPQVFGRSLQENIAYGLTQKPTMEEITAAAVKSGAHSFISGLPQGYDTEVDEAGSQLSGGQRQAVALARALIRKPCVLILDDATSALDANSQLQVEQLLYESPERYSRSVLLITQHLSLVEQADHILFLEGGAIREGGTHQQLMEKKGCYWAMVQAPADAPE

SEQ ID NO: 59 - DNA, 3096 bp, Homo sapiens
cgggcgcccagagggcaaatgaggggcggcggggtggcgggtcggggggagacgcggaatttcccagcgcgggggctctggcttaccctgcaaccgggcagtctctttctgtttacggagagaaaggggaaatggaaaagtcggggaggcggtggctggcgtccgctgcgccgcccctgggcaggctcagacgccgtgagtcaggggcagagcagggcggtctgagcgtgcgggcgacgcgggtctcactcgtccgctccgctctggactgcgcgccacgctctggggtccggcgccctggttcctgcttctgccgctgccgccgccggatcccagtggcccggcgtgctcggctcccacaggcctgcagccagcatcgcaccgaaccttcggggggccgcggctggagcgctcggccggcgtgggagcgccaaggccgcagatgcaatcttcttaccgcgaagaagccaggggaataggtagccacatcttgtttgcagataagaaaggaagctaacgcagtatctgcaaagccaggagtctgactcagtacttttctcactcatgcatacaaagcagctaaaaatgacacagcttatttaccatgcccctgacactgcactgagcactttatgagcttgaactctgttaatcctcacgaccacctcatgagactctccagaaagagcaacagtaatggagtacatgagcactggaagtgacaataaagaagagattgatttattaattaaacatttaaatgtgtctgatgtaatagacattatggaaaatctttatgcaagtgaagagccagcagtttatgaacccagtctaatgaccatgtgtcaagacagtaatcaaaacgatgagcgttctaagtctctgctgcttagtggccaagaggtaccatggttgtcatcagtcagatatggaactgtggaggatttgcttgcttttgcaaaccatatatccaacactgcaaagcatttttatggacaacgaccacaggaatctggaattttattaaacatggtcatcactccccaaaatggacgttaccaaatagattccgatgttctcctgatcccctggaagctgacttacaggaatattggttctgattttattcctcggggcgcctttggaaaggtatacttggcacaagatataaagacgaagaaaagaatggcgtgtaaactgatcccagtagatcaatttaagccatctgatgtggaaatccaggcttgcttccggcacgagaacatcgcagagctgtatggcgcagtcctgtggggtgaaactgtccatctctttatggaagcaggcgagggagggtctgttctggagaaactggagagctgtggaccaatgagagaatttgaaattatttgggtgacaaagcatgttctcaagggacttgattttctacactcaaagaaagtgatccatcatgatattaaacctagcaacattgttttcatgtccacaaaagctgttttggtggattttggcctaagtgttcaaatgaccgaagatgtctattttcctaaggacctccgaggaacagagatttacatgagcccagaggtcatcctgtgcaggggccattcaaccaaagcagacatctacagcctgggggccacgctcatccacatgcagacgggcaccccaccctgggtgaagcgctaccctcgctcagcctatccctcctacctgtacataatccacaagcaagcacctccactggaagacattgcagatgactgcagtccagggatgagagagctgatagaagcttccctggagagaaaccccaatcaccgcccaagagccgcagacctactaaaacatgaggccctgaacccgcccagagaggatcagccacgctgtcagagtctggactctgccctcttggagcgcaagaggctgctgagtaggaaggagctggaacttcctgagaacattgctgattcttcgtgcacaggaagcaccgaggaatctgagatgctcaagaggcaacgctctctctacatcgacctcggcgctctggctggctacttcaatcttgttcggggaccaccaacgcttgaatatggctgaaggatgccatgtttgctctaaattaagacagcattgatctcctggaggctggttctgctgcctctacacaggggccctgtacagtgaatggtgccattttcgaaggagcagtgtgacctcctgtgacccatgaatgtgcctccaagcggccctgtgtgtttgacatgtgaagctatttgatatgcaccaggtctcaaggttctcatttctcaggtgacgtgattctaaggcaggaatttgagagttcacagaaggatcgtgtctgctgactgtttcattcactgtgcactttgctcaaaattttaaaaataccaatcacaaggataatagagtagcctaaaattactattcttggttcttatttaagtatggaatattcattttactcagaatagctgttttgtgtatattggtgtatattatataactctttgagcctttattggtaaattctggtatacattgaattcattataatttgggtgactagaacaacttgaagattgtagcaataagctggactagtgtcctaaaaatggctaactgatgaattagaagccatctgacagcaggccactagtgacagtttcttttgtgttcctatggaaacattttatactgtacatgctatgctgaagacattcaaaacgtgatgttttgaatgtggataaaactgtgtaaaccacataatttttgtacatcccaaaggatgagaatgtgacctttaagaaaaatgaaaacttttgtaaattattgatgattttgtaattcttatgactaaattttcttttaagcatttgtatattaaaatagcatactgtgtatgttttatatcaaatgccttcatgaatctttcatacatatatatatttgtaacattgtaaagtatgtgagtagtcttatgtaaagtatgtttttacattatgcaaataaaacccaatacttttgtccaatgtggttggtcaaatcaactgaataaattcagtattttgcctt

SEQ ID NO: 60 - protein, 467 aa, Homo sapiens
MEYMSTGSDNKEEIDLLIKHLNVSDVIDIMENLYASEEPAVYEPSLMTMCQDSNQNDERSKSLLLSGQEVPWLSSVRYGTVEDLLAFANHISNTAKHFYGQRPQESGILLNMVITPQNGRYQIDSDVLLIPWKLTYRNIGSDFIPRGAFGKVYLAQDIKTKKRMACKLIPVDQFKPSDVEIQACFRHENIAELYGAVLWGETVHLFMEAGEGGSVLEKLESCGPMREFEIIWVTKHVLKGLDFLHSKKVIHHDIKPSNIVFMSTKAVLVDFGLSVQMTEDVYFPKDLRGTEIYMSPEVILCRGHSTKADIYSLGATLIHMQTGTPPWVKRYPRSAYPSYLYIIHKQAPPLEDIADDCSPGMRELIEASLERNPNHRPRAADLLKHEALNPPREDQPRCQSLDSALLERKRLLSRKELELPENIADSSCTGSTEESEMLKRQRSLYIDLGALAGYFNLVRGPPTLEYG

SEQ ID NO: 61 - DNA, 4445 bp, Homo sapiens
cgctccccgctcccgtggctgccgccgccccggggaagaagagacaggggtggggtttgggggaagcgagagaggaggggagagaccctggccaggctggagcctggattcgaggggaggagggacgggaggaggagaaaggtggaggagaagggaggggggagcggggaggagcggccgggcctggggccttgaggcccggggagagccggggagccgggcccgcgcgccgagatgttgctgctgctgttactggcgccactcttcctccgccccccgggcgcgggcggggcgcagacccccaacgccacctcagaaggttgccagatcatacacccgccctgggaagggggcatcaggtaccggggcctgactcgggaccaggtgaaggctatcaacttcctgccagtggactatgagattgagtatgtgtgccggggggagcgcgaggtggtggggcccaaggtccgcaagtgcctggccaacggctcctggacagatatggacacacccagccgctgtgtccgaatctgctccaagtcttatttgaccctggaaaatgggaaggttttcctgacgggtggggacctcccagctctggacggagcccgggtggatttccggtgtgaccccgacttccatctggtgggcagctcccggagcatctgtagtcagggccagtggagcacccccaagccccactgccaggtgaatcgaacgccacactcagaacggcgcgcagtgtacatcggggcactgtttcccatgagcgggggctggccagggggccaggcctgccagcccgcggtggagatggcgctggaggacgtgaatagccgcagggacatcctgccggactatgagctcaagctcatccaccacgacagcaagtgtgatccaggccaagccaccaagtacctatatgagctgctctacaacgaccctatcaagatcatccttatgcctggctgcagctctgtctccacgctggtggctgaggctgctaggatgtggaacctcattgtgctttcctatggctccagctcaccagccctgtcaaaccggcagcgtttccccactttcttccgaacgcacccatcagccacactccacaaccctacccgcgtgaaactctttgaaaagtggggctggaagaagattgctaccatccagcagaccactgaggtcttcacttcgactctggacgacctggaggaacgagtgaaggaggctggaattgagattactttccgccagagtttcttctcagatccagctgtgcccgtcaaaaacctgaagcgccaggatgcccgaatcatcgtgggacttttctatgagactgaagcccggaaagttttttgtgaggtgtacaaggagcgtctctttgggaagaagtacgtctggttcctcattgggtggtatgctgacaattggttcaagatctacgacccttctatcaactgcacagtggatgagatgactgaggcggtggagggccacatcacaactgagattgtcatgctgaatcctgccaatacccgcagcatttccaacatgacatcccaggaatttgtggagaaactaaccaagcgactgaaaagacaccctgaggagacaggaggcttccaggaggcaccgctggcctatgatgccatctgggccttggcactggccctgaacaagacatctggaggaggcggccgttctggtgtgcgcctggaggacttcaactacaacaaccagaccattaccgaccaaatctaccgggcaatgaactcttcgtcctttgagggtgtctctggccatgtggtgtttgatgccagcggctctcggatggcatggacgcttatcgagcagcttcagggtggcagctacaagaagattggctactatgacagcaccaaggatgatctttcctggtccaaaacagataaatggattggagggtcccccccagctgaccagaccctggtcatcaagacattccgcttcctgtcacagaaactctttatctccgtctcagttctctccagcctgggcattgtcctagctgttgtctgtctgtcctttaacatctacaactcacatgtccgttatatccagaactcacagcccaacctgaacaacctgactgctgtgggctgctcactggctttagctgctgtcttccccctggggctcgatggttaccacattgggaggaaccagtttcctttcgtctgccaggcccgcctctggctcctgggcctgggctttagtctgggctacggttccatgttcaccaagatttggtgggtccacacggtcttcacaaagaaggaagaaaagaaggagtggaggaagactctggaaccctggaagctgtatgccacagtgggcctgctggtgggcatggatgtcctcactctcgccatctggcagatcgtggaccctctgcaccggaccattgagacatttgccaaggaggaacctaaggaagatattgacgtctctattctgccccagctggagcattgcagctccaggaagatgaatacatggcttggcattttctatggttacaaggggctgctgctgctgctgggaatcttccttgcttatgagaccaagagtgtgtccactgagaagatcaatgatcaccgggctgtgggcatggctatctacaatgtggcagtcctgtgcctcatcactgctcctgtcaccatgattctgtccagccagcaggatgcagcctttgcctttgcctctcttgccatagttttctcctcctatatcactcttgttgtgctctttgtgcccaagatgcgcaggctgatcacccgaggggaatggcagtcggaggcgcaggacaccatgaagacagggtcatcgaccaacaacaacgaggaggagaagtcccggctgttggagaaggagaaccgtgaactggaaaagatcattgctgagaaagaggagcgtgtctctgaactgcgccatcaactccagtctcggcagcagctccgctcccggcgccacccaccgacacccccagaaccctctgggggcctgcccaggggaccccctgagccccccgaccggcttagctgtgatgggagtcgagtgcatttgctttataagtgagggtagggtgagggaggacaggccagtagggggagggaaagggagaggggaagggcaggggactcaggaagcagggggtccccatccccagctgggaagaacatgctatccaatctcatctcttgtaaatacatgtccccctgtgagttctgggctgatttgggtctctcatacctctgggaaacagacctttttctctcttactgcttcatgtaattttgtatcacctcttcacaatttagttcgtacctggcttgaagctgctcactgctcacacgctgcctcctcagcagcctcactgcatctttctcttcccatgcaacaccctcttctagttaccacggcaacccctgcagctcctctgcctttgtgctctgttcctgtccagcaggggtctcccaacaagtgctctttccaccccaaaggggcctctccttttctccactgtcataatctctttccatcttacttgcccttctatactttctcacatgtggctccccctgaattttgcttcctttgggagctcattcttttcgccaaggctcacatgctccttgcctctgctctgtgcactcacgctcagcacacatgcatcctcccctctcctgcgtgtgcccactgaacatgctcatgtgtacacacgcttttcccgtatgctttcttcatgttcagtcacatgtgctctcgggtgccctgcattcacagctacgtgtgcccctctcatggtcatgggtctgcccttgagcgtgtttgggtaggcatgtgcaatttgtctagcatgctgagtcatgtctttcctatttgcacacgtccatgtttatccatgtactttccctgtgtaccctccatgtaccttgtgtactttcttcccttaaatcatggtattcttctgacagagccatatgtaccctaccctgcacattgttatgcacttttccccaattcatgtttggtggggccatccacaccctctccttgtcacagaatctccatttctgctcagattccccccatctccattgcattcatgtactaccctcagtctacactcacaatcatcttctcccaagactgctcccttttgttttgtgtttttttgaggggaattaaggaaaaataagtgggggcaggtttggagagctgcttccagtggatagttgatgagaatcctgaccaaaggaaggcacccttgactgttgggatagacagatggacctatggggtgggaggtggtgtccctttcacactgtggtgtctcttggggaaggatctccccgaatctcaataaaccagtgaacagtgtgactcggcaaaaaaaaaaa

SEQ ID NO: 62 - protein, 961 aa, Homo sapiens
MLLLLLLAPLFLRPPGAGGAQTPNATSEGCQIIHPPWEGGIRYRGLTRDQVKAINFLPVDYEIEYVCRGEREVVGPKVRKCLANGSWTDMDTPSRCVRICSKSYLTLENGKVFLTGGDLPALDGARVDFRCDPDFHLVGSSRSICSQGQWSTPKPHCQVNRTPHSERRAVYIGALFPMSGGWPGGQACQPAVEMALEDVNSRRDILPDYELKLIHHDSKCDPGQATKYLYELLYNDPIKIILMPGCSSVSTLVAEAARMWNLIVLSYGSSSPALSNRQRFPTFFRTHPSATLHNPTRVKLFEKWGWKKIATIQQTTEVFTSTLDDLEERVKEAGIEITFRQSFFSDPAVPVKNLKRQDARIIVGLFYETEARKVFCEVYKERLFGKKYVWFLIGWYADNWFKIYDPSINCTVDEMTEAVEGHITTEIVMLNPANTRSISNMTSQEFVEKLTKRLKRHPEETGGFQEAPLAYDAIWALALALNKTSGGGGRSGVRLEDFNYNNQTITDQIYRAMNSSSFEGVSGHVVFDASGSRMAWTLIEQLQGGSYKKIGYYDSTKDDLSWSKTDKWIGGSPPADQTLVIKTFRFLSQKLFISVSVLSSLGIVLAVVCLSFNIYNSHVRYIQNSQPNLNNLTAVGCSLALAAVFPLGLDGYHIGRNQFPFVCQARLWLLGLGFSLGYGSMFTKIWWVHTVFTKKEEKKEWRKTLEPWKLYATVGLLVGMDVLTLAIWQIVDPLHRTIETFAKEEPKEDIDVSILPQLEHCSSRKMNTWLGIFYGYKGLLLLLGIFLAYETKSVSTEKINDHRAVGMAIYNVAVLCLITAPVTMILSSQQDAAFAFASLAIVFSSYITLVVLFVPKMRRLITRGEWQSEAQDTMKTGSSTNNNEEEKSRLLEKENRELEKIIAEKEERVSELRHQLQSRQQLRSRRHPPTPPEPSGGLPRGPPEPPDRLSCDGSRVHLLYK

SEQ ID NO: 63 - DNA, 1872 bp, Homo sapiens
gtacttacacaaccccagatggtacaacctacaacacacctaggctgtatgatgtagccaattgctcctagactacaaatctatacagcatgttgctgtactgaatactctaagcaattataacacaatgacctagcaacagtaacataagcaaaggagagtcacgcccaaaatggaaacccaaagccaaagtaccccttcagactctacatatgacttctgagaatcaagagaaagtgaaagctcttctccgagacctgcaagaacaagatgctgatgctggatctgaaagaggcctttctggggaggaggaagatgatgagcctgattgctgtaacgatgagcggtactggccagctggacaggaaccttccctcgttcccgacttggatcctttggaatatgctggcttagcctcagtggagccttatgttccagaatttacagtctccccatttgcagtgcaaaaactttccaggtatggtttcaatactgaacgctgtcaagcggtcctgaggatgtgtgatggagatgtgggagcatcactagagcatctccttacccagtgtttttcagagacatttggagagaggatgaagatctctgaggcagtcaaccagataagcttggatgagtgtatggaacagcgacaggaagaggcatttgctctcaagtccatctgtggagaaaaatttatagaaagaattcagaacagagtctggaccattgggttagaactggagtatctgacaagtagattccgcaaatccaagccaaaagaaagtaccaaaaatgtacaagagaattcacttgaaatctgtaaattttacctcaaaggaaattgtaaatttggatcaaaatgcagattcaaacatgaagtgcccccaaatcaaattgttggaagaatagaaagaagtgtagatgattctcatcttaatgctattgaagatgcatcttttttatatgaacttgaaattcgattttctaaagaccacaaatatccctaccaagctccgctcgtggcattttattccaccaatgagaacctacctctggcttgtcgtttacatatttctgagtttctttatgacaaggccttgacatttgcggaaacttcggaacctgtcgtatattctttgataacccttttagaggaagagtcggaaatagtcaagttactaacgaatacccaccacaagtatagtgaccctcctgtgaactttctgccagtaccctctaggaccagaataaataatcctgcctgtcataaaacagtgattccaaataattcttttgtttctaatcaaattccagaagttgaaaaagcatcagaatctgaggagtcagatgaggatgacggtcctgcacctgttatagtagagaatgaaagctatgtgaaccttaagaaaaagatttccaaaagatatgactggcaggcaaagtcagtacatgctgaaaatggtaaaatctgcaagcagttccgaatgaaacaggtgctcaatagccacatgtagccaggtgttgctgtattggacagcacaggtatagaacatttccatcaacacggaaagttctattggacagtactggtatagagactcttgttgggaagaactggatatgtgctaagcaagagggctttatttcacccagaaaatctttcggtttattcagatgttggaaaactaatgtacagattccacaactcattctggctgattctctgagcagcattctgaataaagtcttctacatccaatcccaacaaatccaacaaaggatcactcaaggccaggagtgcaagaccatccagggcaacataacaagactctgtctctataattaaaaaaaaaaaaaagctgtaatcccaaa

SEQ ID NO: 64 - protein, 433 aa, Homo sapiens
MTSENQEKVKALLRDLQEQDADAGSERGLSGEEEDDEPDCCNDERYWPAGQEPSLVPDLDPLEYAGLASVEPYVPEFTVSPFAVQKLSRYGFNTERCQAVLRMCDGDVGASLEHLLTQCFSETFGERMKISEAVNQISLDECMEQRQEEAFALKSICGEKFIERIQNRVWTIGLELEYLTSRFRKSKPKESTKNVQENSLEICKFYLKGNCKFGSKCRFKHEVPPNQIVGRIERSVDDSHLNAIEDASFLYELEIRFSKDHKYPYQAPLVAFYSTNENLPLACRLHISEFLYDKALTFAETSEPVVYSLITLLEEESEIVKLLTNTHHKYSDPPVNFLPVPSRTRINNPACHKTVIPNNSFVSNQIPEVEKASESEESDEDDGPAPVIVENESYVNLKKKISKRYDWQAKSVHAENGKICKQFRMKQVLNSHM

SEQ ID NO: 65 - DNA, 2186 bp, Homo sapiens
agtaaggagaaccagccaggcagaacatcacagcgggaggagctgtcccaggtggcccagctcagcaatggcaatgggggtccccagagtcattctgctctgcctctttggggctgcactctgcctgacagggtcccaagccctgcagtgctacagctttgagcacacctactttggcccctttgacctcagggccatgaagctgcccagcatctcctgtcctcatgagtgctttgaggctatcctgtctctggacaccgggtatcgcgcgccggtgaccctggtgcggaagggctgctggaccgggcctcctgcgggccagacgcaatcgaacgcggacgcgctgccgccagactactcggtggtgcgcggctgcacaactgacaaatgcaacgcccacctcatgactcatgacgccctccccaacctgagccaagcacccgacccgccgacgctcagcggcgccgagtgctacgcctgtatcggggtccaccaggatgactgcgctatcggcaggtcccgacgagtccagtgtcaccaggaccagaccgcctgcttccagggcaatggcagaatgacagttggcaatttctcagtccctgtgtacatcagaacctgccaccggccctcctgcaccaccgagggcagcaccagcccctggacagccatcgacctccagggctcctgctgtgaggggtacctctgcaacaggaaatccatgacccagcccttcaccagtgcttcagccaccacccctccccgagcactacaggtcctggccctgctcctcccagtcctcctgctggtggggctctcagcatagaccgcccctccaggatgctggggacagggctcacacacctcattcttgctgcttcagcccctatcacatagctcactggaaaatgatgttaaagtaagaattgcactcctgtccctctggccttccatctctcccgcccttgtgccccacaacctggccaacagtactggaagaaactggacacagtcaccagcatccccggggagggcaaaacagccatgtcgtgccctgatgaagagcaattctgatcacagctgttactcactgagcaccagccaggcaccaggcaccccataacacggcttcctgtgctctccctccagagcctgtcgcagctctaggagggagctatacaatgatgtctttattagtgtcatcatgagaagcccaataagcagtatgccctaacagttagtaggccaggctctggagctaagctgcatgggttcaaatcccagctccaccattcagcctgcagagaccatgagcgagttacttaagccaggctctggagctaagctgcatgggttcaaatcccagctccagcattcagcctacagagaccatgggtgagttacttaagccaggctctggagctaagctgcatgggttcaaatcccagctccaccattcagcctgcagagactgtgggtgagttacttgagctctctgtgccaatattttctcacctataaggtggaggtgaaaataaactctataacatgacaagaactacttcacagtagttgcagtgaggattcaacgagatgaacatttagtacttgggacacagcagtggcccagtgtaaatgggctacttgtcataagccctaagtcacaggtcaacaaactgagaggcaaaagcacttggttgagcttgtgtatctagtgagtatggattcagggaccagattcccagccccacgaactgctaagcaaccccacctcctaaacacatgagtgccgattaacttcacagaaaaacacacaaggcaaagttcagcgaggtgaaattctccaagctataaagatcagggaagacttcctggaggaattcacccttgagcaaaatcctaaaggatcaatagtagctggcaaaaagaagcaggaggaagcgcattctaggtagaggagacagcctggacaaaggtctgagggaggaaggagcacaaggagtgcaggacactttcatgagtgcaggacactttcataactgcatgaacttcatagagatgggatcctttagcatgttctctgtgcacatgcttgaccatgttctttcacatgctttttgccacttgatctttccagcaactcagtgagagaagcaaaaaagtaagttgcatccaaaaaaaaaaaaaaa

SEQ ID NO: 66 - protein, 208 aa, Homo sapiens
MKLPSISCPHECFEAILSLDTGYRAPVTLVRKGCWTGPPAGQTQSNADALPPDYSVVRGCTTDKCNAHLMTHDALPNLSQAPDPPTLSGAECYACIGVHQDDCAIGRSRRVQCHQDQTACFQGNGRMTVGNFSVPVYIRTCHRPSCTTEGSTSPWTAIDLQGSCCEGYLCNRKSMTQPFTSASATTPPRALQVLALLLPVLLLVGLSA

SEQ ID NO: 67 - DNA, 3143 bp, Homo sapiens
ggcacgaggcccagcactagaagtcggcggtgtttcctttcggtgatcagcactgaacacagaggactcgccatggagtttgggctgagctgggttttcctcgttgctcttttaagaggtgtccagtgtcaggcgcagttggtggagtctgggggaggcgtggtccagcccgggagctccctgagactctcctgtgcagcctctggtttcaggttcagcaattatggcatgcactgggtccgccaggctccaggcaaggggctggagtgggtggcagttttttcatatgatgaaagtgataaatattatgcagcctccgtgaagggtcgatttaccatctccagagacaactccaagaacacgttgtctctgcaaatgaacagcctgagagttgaggacacggctgtttactactgtgcgaaagatcagaagccctggtacagcaacagctggtttctaaccaactttgactcttggggccggggcaccctggtcaccgtctcctcagcctccaccaagggcccatcggtcttccccctggcaccctcctccaagagcacctctgggggcacagcggccctgggctgcctggtcaaggactacttccccgaaccggtgacggtgtcgtggaactcaggcgccctgaccagcggcgtgcacaccttcccggctgtcctacagtcctcaggactctactccctcagcagcgtggtgaccgtgccctccagcagcttgggcacccagacctacatctgcaacgtgaatcacaagcccagcaacaccaaggtggacaagaaagttgagcccaaatcttgtgacaaaactcacacatgcccaccgtgcccagcacctgaactcctggggggaccgtcagtcttcctcttccccccaaaacccaaggacaccctcatgatctcccggacccctgaggtcacatgcgtggtggtggacgtgagccacgaagaccctgaggtcaagttcaactggtacgtggacggcgtggaggtgcataatgccaagacaaagccgcgggaggagcagtacaacagcacgtaccgtgtggtcagcgtcctcaccgtcctgcaccaggactggctgaatggcaaggagtacaagtgcaaggtctccaacaaagccctcccagcccccatcgagaaaaccatctccaaagccaaagggcagccccgagaaccacaggtgtacaccctgcccccatcccgggatgagctgaccaagaaccaggtcagcctgacctgcctggtcaaaggcttctatcccagcgacatcgccgtggagtgggagagcaatgggcagccggagaacaactacaagaccacgcctcccgtgctggactccgacggctccttcttcctctacagcaagctcaccgtggacaagagcaggtggcagcaggggaacgtcttctcatgctccgtgatgcatgaggctctgcacaaccactacacgcagaagagcctctccctgtctccggagctgcaactggaggagagctgtgcggaggcgcaggacggggagctggacgggctgtggacgaccatcaccatcttcatcacactcttcctgttaagcgtgtgctacagtgccaccgtcaccttcttcaaggtgaagtggatcttctcctcggtggtggacctgaagcagaccatcatccccgactacaggaacatgatcggacagggggcctagggccaccctctgcggggtgtccagggccgcccagaccccacacaccagccatgggccatgctcagccaccacccaggccacacctgcccccgacctcaccgccctcaaccccatggctctctggcctcgcagttgccctctgaccctgacacacctgacacgccccccttccagaccctgtgcatagcaggtctaccccagacctccgctgcttggtgcatgcagggcactgggggccaggtgtcccctcagcaggacatccttgccctccggaccacaaggtgctcacacaaaaggaggcagtgaccggtatcccaggcccccacccaggcaggagctggccctggagccaaccccgtccacgccagcctcctgaacacaggcgtggtttccagatggtgagtgggagcatcagccgccaaggtagggaagccacagcaccatcaggccctgttggggaggcttccgagagctgcgaaggctcactcagacggccttcctcccagcccgcagccagccagcctccattccgggcactcccgtgaactcctgacatgaggaatgaggttgttctgatttcaagcaaagaacgctgctctctggctcctgggaacagtctcggtgccagcaccaccccttggctgcctgcccacactgctggattctcgggtggaactggacccgcagggacagccagccccagagtccgcactggggagagaaggggccaggcccaggacactgccacctcccacccactccagtccaccgagatcactcagagaagagcctgggccatgtggccgctgcaggagccccacagtgcaagggtgaggatagcccaaggaagggctgggcatctgcccagacaggcctcccagagaaggctggtgaccaggtcccaggcgggcaagactcagccttggtggggcctgaggacagaggaggcccaggagcatcggggagagaggtggagggacaccgggagagccaggagcgtggacacagccagaactcatcacagaggctggcgtccagtcccgggtcacgtgcagcaggaacaagcagccactctgggggcaccaggtggagaggcaagacgacaaagagggtgcccgtgttcttgcgaaagcggggctgctggccacgagtgctggacagaggcccccacgctctgctgcccccatcacgccgttccgtgactgtcacgcagaatccgcagacaggaagggagactcgagcgggagtgcggccagcgcctgcctcggccgtcagggaggactcccgggctcactcgaaggaggtgccaccatttcagctttggtagcttttcttcttcttttaaattttctaaagctcattaattgtctttgatgtttcttttgtgatgacaataaaatatcctttttaagtcttgtaaaaaaaaaaaaaaaaaa

SEQ ID NO: 68 - protein, 544 aa, Homo sapiens
MEFGLSWVFLVALLRGVQCQAQLVESGGGVVQPGSSLRLSCAASGFRFSNYGMHWVRQAPGKGLEWVAVFSYDESDKYYAASVKGRFTISRDNSKNTLSLQMNSLRVEDTAVYYCAKDQKPWYSNSWFLTNFDSWGRGTLVTVSSASTKGPSVFPLAPSSKSTSGGTAALGCLVKDYFPEPVTVSWNSGALTSGVHTFPAVLQSSGLYSLSSVVTVPSSSLGTQTYICNVNHKPSNTKVDKKVEPKSCDKTHTCPPCPAPELLGGPSVFLFPPKPKDTLMISRTPEVTCVVVDVSHEDPEVKFNWYVDGVEVHNAKTKPREEQYNSTYRVVSVLTVLHQDWLNGKEYKCKVSNKALPAPIEKTISKAKGQPREPQVYTLPPSRDELTKNQVSLTCLVKGFYPSDIAVEWESNGQPENNYKTTPPVLDSDGSFFLYSKLTVDKSRWQQGNVFSCSVMHEALHNHYTQKSLSLSPELQLEESCAEAQDGELDGLWTTITIFITLFLLSVCYSATVTFFKVKWIFSSVVDLKQTIIPDYRNMIGQGA

SEQ ID NO: 69 - DNA, 1124 bp, Homo sapiens
tccgcaggcggaccgggggcaaaggaggtggcatgtcggtcaggcacagcagggtcctgtgtccgcgctgagccgcgctctccctgctccagcaaggaccatgagggcgctggaggggccaggcctgtcgctgctgtgcctggtgttggcgctgcctgccctgctgccggtgccggctgtacgcggagtggcagaaacacccacctacccctggcgggacgcagagacaggggagcggctggtgtgcgcccagtgccccccaggcacctttgtgcagcggccgtgccgccgagacagccccacgacgtgtggcccgtgtccaccgcgccactacacgcagttctggaactacctggagcgctgccgctactgcaacgtcctctgcggggagcgtgaggaggaggcacgggcttgccacgccacccacaaccgtgcctgccgctgccgcaccggcttcttcgcgcacgctggtttctgcttggagcacgcatcgtgtccacctggtgccggcgtgattgccccgggcacccccagccagaacacgcagtgccagccgtgccccccaggcaccttctcagccagcagctccagctcagagcagtgccagccccaccgcaactgcacggccctgggcctggccctcaatgtgccaggctcttcctcccatgacaccctgtgcaccagctgcactggcttccccctcagcaccagggtaccaggagctgaggagtgtgagcgtgccgtcatcgactttgtggctttccaggacatctccatcaagaggctgcagcggctgctgcaggccctcgaggccccggagggctggggtccgacaccaagggcgggccgcgcggccttgcagctgaagctgcgtcggcggctcacggagctcctgggggcgcaggacggggcgctgctggtgcggctgctgcaggcgctgcgcgtggccaggatgcccgggctggagcggagcgtccgtgagcgcttcctccctgtgcactgatcctggccccctcttatttattctacatccttggcaccccacttgcactgaaagaggcttttttttaaatagaagaaatgaggtttcttaaagcttatttttataaagctttttcataaaa

SEQ ID NO: 70 - protein, 300 aa, Homo sapiens
MRALEGPGLSLLCLVLALPALLPVPAVRGVAETPTYPWRDAETGERLVCAQCPPGTFVQRPCRRDSPTTCGPCPPRHYTQFWNYLERCRYCNVLCGEREEEARACHATHNRACRCRTGFFAHAGFCLEHASCPPGAGVIAPGTPSQNTQCQPCPPGTFSASSSSSEQCQPHRNCTALGLALNVPGSSSHDTLCTSCTGFPLSTRVPGAEECERAVIDFVAFQDISIKRLQRLLQALEAPEGWGPTPRAGRAALQLKLRRRLTELLGAQDGALLVRLLQALRVARMPGLERSVRERFLPVH

SEQ ID NO: 71 - DNA, 716 bp, Homo sapiens
aggctcagtataaatagcagccaccgctccctggcaggcagggacccgcagctcagctacagcacagatcaggtgaggagcacaccaaggagtgatttttaaaacttactctgttttctctttcccaacaagattatcatttcctttaaaaaaaatagttatcctggggcatacagccataccattctgaaggtgtcttatctcctctgatctagagagcaccatgaagcttctcacgggcctggttttctgctccttggtcctgggtgtcagcagccgaagcttcttttcgttccttggcgaggcttttgatggggctcgggacatgtggagagcctactctgacatgagagaagccaattacatcggctcagacaaatacttccatgctcgggggaactatgatgctgccaaaaggggacctgggggtgcctgggctgcagaagtgatcagcgatgccagagagaatatccagagattctttggccatggtgcggaggactcgctggctgatcaggctgccaatgaatggggcaggagtggcaaagaccccaatcacttccgacctgctggcctgcctgagaaatactgagcttcctcttcactctgctctcaggagatctggctgtgaggccctcagggcagggatacaaagcggggagagggtacacaatgggtatctaataaatacttaagaggtggaatttgtggaaact

SEQ ID NO: 72 - protein, 122 aa, Homo sapiens
MKLLTGLVFCSLVLGVSSRSFFSFLGEAFDGARDMWRAYSDMREANYIGSDKYFHARGNYDAAKRGPGGAWAAEVISDARENIQRFFGHGAEDSLADQAANEWGRSGKDPNHFRPAGLPEKY

SEQ ID NO: 73 - DNA, 1100 bp, Homo sapiens
ctaaagctgggttggtagctcctacctactgtgtggcaagaaggtatgggtcatgaacagaaccaaggagctgcgctgctacagatgttaccacttctgtggctgctaccccactcctgggccgtccctgaagctcctactccaatgtggccagatgacctgcaaaaccacacattcctgcacacagtgtactgccaggatgggagtcccagtgtgggactctctgaggcctacgacgaggaccagcttttcttcttcgacttttcccagaacactcgggtgcctcgcctgcccgaatttgctgactgggctcaggaacagggagatgctcctgccattttatttgacaaagagttctgcgagtggatgatccagcaaatagggccaaaacttgatgggaaaatcccggtgtccagagggtttcctatcgctgaagtgttcacgctgaagcccctggagtttggcaagcccaacactttggtctgttttgtcagtaatctcttcccacccatgctgacagtgaactggcagcatcattccgtccctgtggaaggatttgggcctacttttgtctcagctgtcgatggactcagcttccaggccttttcttacttaaacttcacaccagaaccttctgacattttctcctgcattgtgactcacgaaattgaccgctacacagcaattgcctattgggtaccccggaacgcactgccctcagatctgctggagaatgtgctgtgtggcgtggcctttggcctgggtgtgctgggcatcatcgtgggcattgttctcatcatctacttccggaagccttgctcaggtgactgattcttccagaccagagtttgatgccagcagcttcggccatccaaacagaggatgctcagatttctcacatcctgcccaggatctcctcttagggtagaagaagtctctgggacatccctggggtgtgtgtgtagatttcccacctggggactctgctgtccctgggcttgcatcccagggatcccagagtggcctgcctatcacaaccacatcccttccccccacaaggcaataaatctcatttctttaaaaaaaaaaaaaaaaaaaaa

SEQ ID NO: 74 - protein, 261 aa, Homo sapiens
MGHEQNQGAALLQMLPLLWLLPHSWAVPEAPTPMWPDDLQNHTFLHTVYCQDGSPSVGLSEAYDEDQLFFFDFSQNTRVPRLPEFADWAQEQGDAPAILFDKEFCEWMIQQIGPKLDGKIPVSRGFPIAEVFTLKPLEFGKPNTLVCFVSNLFPPMLTVNWQHHSVPVEGFGPTFVSAVDGLSFQAFSYLNFTPEPSDIFSCIVTHEIDRYTAIAYWVPRNALPSDLLENVLCGVAFGLGVLGIIVGIVLIIYFRKPCSGD

SEQ ID NO: 75 - DNA, 4927 bp, Homo sapiens
ggcaggtgcagctgccacagtgagacgggcaccccgacccgggcatggaggggggcaaggggcccaggctcagagacttcctgagtgggagtctggctacctgggcgctgggactggccgggctggtcggggaggcggaggactcggagggggaagaagaggaagaggaggaagagccgcccctttggttggagaagagattcctgcgcctcagcgatggggccctgctcctccgggtgctgggcatcattgcccccagctcccgagggggacctcggatgctcagaggccttgacggacctgctgcctggcgagtgtggaacctgaaccacctgtggggccgactgagggacttctaccaggaggagctgcagctgctgatcctgtcgccacccccagacctccagacattgggatttgaccctctctcagaagaagcggtggagcagctggaaggcgttcttcggctactgttgggagcgtcagtacagtgtgagcaccgggaactcttcatccgccacatccagggcctcagtctcgaggtccagagcgagctggccgctgccatccaggaggtgacccagccgggggccggcgtggtgctggcactgtctgggccagatcctggggagctggcacctgccgagctggagatgctgtcccggagcctgatggggacactgtcgaagctggcacgggagcgtgacctgggggcccagcggctggctgaactgctgctggagcgagaacccctctgcttgaggcctgaggctccctctagggctcccgccgagggcccctcgcaccatctggccctgcagctggccaacgccaaggctcagctgcggcgtctgcggcaggagctggaggagaaggccgagctgctgctagactcccaggccgaggtgcagggtttggaggccgaaataagaaggctccgccaggaggcccaggcgctgtcgggacaggccaagcgggccgagctgtaccgcgaggaggcagaggcgctgcgggagcgggccggccgcctgccccgcctgcaggaggagctgaggcgctgccgcgagcggctgcaggcggctgaggcctacaagagtcagctggaggaggagcgggtgctctcgggggtgctggaggcgtccaaggcgctgctggaagagcagctggaggctgcccgagagcgctgcgcccggctgcacgagacccagcgcgagaacctgctgctgcgaacccggctgggcgaggcccatgcggagctggactctctgcggcatcaggtggaccagctggctgaggagaatgtggagctggagctggagcttcagcggagcttggagccacctccaggatcccctggggaggcacccctagcaggagcggccccctcgctgcaagatgaggtgagggaggcagaggctgggcggcttcggacccttgagagggagaaccgggagcttcgggggctgcttcaggtgcttcaggggcagccagggggccagcaccccctgctggaggcaccgagagaggaccctgttcttccagtgctggaggaggctccccagactcctgtggccttcgaccacagccctcagggcttggttcagaaggcaagggatggaggcccccaggccttggacttggctcccccggcattagactcagtgctcgaggcatcagctgagtgtccccaggcacctgattcagacccacaggaggcagagagtccccttcaggcagctgccatggacccccaggcctcagactggtccccgcaagagtcaggctctcctgtggagacacaggagtccccggagaaggctggccgtagatcctctctccagagccctgcctctgtggccccacctcagggtccagggaccaaaattcaggccccgcagttgctgggaggagagacagagggaagagaggctccccaaggcgagttggtgcctgaggcctgggggttgagacaggagggccctgagcacaagccagggccttcggagcccagctctgtgcagctggaggagcaggagggcccaaaccagggcctggacctggccacgggacaagcagaggccagagagcatgaccagaggctggaagggacggtcagggacccagcctggcaaaaaccacagcagaagtcagaaggggctcttgaggtccaggtctgggaaggcccaatcccaggggagagcctggccagtggtgtcgcagagcaggaggccctcagggaggaggtggcacagttgaggagaaaggctgaggcccttggagatgagctggaagcccaggcccgcaagctggaggcccaaaacacggaggctgcccgcctctccaaggagctggcccaagcgcgaagggcagaggccgaggcccaccgggaggcagaggcccaggcctgggagcaagcccggctgcgggaggcagtggaggctgctggccaggagctggagtctgcgtcccaggaacgggaggcgctggtggaggcgctggcagcagcgggccgggagcggaggcagtgggagcgtgaggggtccaggctgcgggcccagtcggaggccgccgaggaacggatgcaggtgctggagagcgagggccgccagcacttggaggaggctgagagggagcgccgggagaaggaggccctccaggcggagctggagaaagctgtggtgcggggcaaggagttgggggcccggctggagcatttgcagcgtgagctggagcaggcggctctcgagcgccaggaatttctgcgagaaaaggaaagccagcaccagaggtaccagggcttggagcagcggctggaagctgagctgcaggcggcggcgaccagcaaggaggaggcgctgatggagctcaagaccagggccctgcagctggaagaggagctgttccagctgcgccagggccccgcggggctggggcccaaaaagcgtgcggagcctcagctggtggagacccagaatgtgcggcttattgaggtggagcgcagtaatgcgatgctggtggcagagaaggcagctttgcaggggcagctgcagcacctggaggggcagctggggagcctgcagggccgtgcccaggagctgctgctgcagagccagcgggcgcaggagcacagcagccgcctgcaggccgagaagtctgtgctggagattcagggccaggagctgcaccggaagctggaggtgctggaggaggaggtgcgggcggcacggcagtcccaggaggagacccgcgggcagcagcaggccctgcttcgggaccacaaggccctggcacagctgcagcggcggcaggaggccgagctagagggactgctggtgcggcaccgagacctcaaggccaacatgcgggcactggagctggcccaccgggagctgcagggccggcacgagcagctgcaggcccagcgggccagcgtggaggcacaggaggtggccctgctggcagagcgtgaacgcctgatgcaagatgggcatcggcagcggggcctggaggaggagctgcggaggcttcagagcgagcacgacagggctcagatgctgctggcagagttgtctcgggagcggggtgagctgcagggtgaacgcggggagctacggggccggctggcgcggctggagctggagcgggcacagctggagatgcagagccagcagctgcgcgagtccaaccagcagctggacctgagcgcctgccggctgaccacgcagtgtgagctattgacacagctgcgaagtgcccaggaagaggagaaccggcagctgctggctgaagttcaggccctgagccgggagaacagggagctcctggagcgcagcctggagagtcgggaccacctgcaccgcgaacagcgggagtacctggaccagcttaatgccctgcgccgcgagaagcagaagctcgtggagaagatcatggaccaataccgcgtgctggagcctgtgcccctgccccggaccaagaagggcagctggctggcagacaaggtgaagaggctgatgcggccccggcgggaggggggcccccctggggggctgcgcctgggggccgatggggctggcagcaccgagagcctggggggccccccggagacggagcttcctgagggcagggaggcagatgggacagggtccccttccccggcacccatgcgccgggcccagagctccctctgcctgcgggatgagaccttggcaggcgggcagcggcggaaactcagctcaaggttcccggtggggcgaagctctgagtcattcagccctggggacacccctaggcaacgattccgacagcgccatccaggccccctgggggcgcccgtctcccacagcaaaggacctggtgtgggatgggagaactccgctgagaccctgcaggaacacgaaacagatgccaaccgagagggccctgaggtacaggaaccggagaaacgtcccctcaccccatccctcagccagtgacaccgtgggaacagcaggcttgggagtgcagccttctcggcactggagtgtcagcggaggccccaggcagcccaagagctcagggagccagggaccccaaggggagtccttggacaaggaggcctgggccctgagatcctccacggtcagcgccggggcccggagatggagctgggacgagtgtgtggacaggggggatggctggcccccacgagcagctccaggctggagttctggttcttccaggtggctcccgctgaggcagcggtctctgggggatcccccagctgaaggaggctggcaggagttggcaagagaaccccctgccctgtccaggtgggaagctgagtcccagtgctgggggactgtggcctgggctgatcttgagccttaactggacatgaggggcatgagaataaagctgaactgcagcctcctgaaaaaaaaaaaaa

SEQ ID NO: 76 - protein, 1476 aa, Homo sapiens
MEGGKGPRLRDFLSGSLATWALGLAGLVGEAEDSEGEEEEEEEEPPLWLEKRFLRLSDGALLLRVLGIIAPSSRGGPRMLRGLDGPAAWRVWNLNHLWGRLRDFYQEELQLLILSPPPDLQTLGFDPLSEEAVEQLEGVLRLLLGASVQCEHRELFIRHIQGLSLEVQSELAAAIQEVTQPGAGVVLALSGPDPGELAPAELEMLSRSLMGTLSKLARERDLGAQRLAELLLEREPLCLRPEAPSRAPAEGPSHHLALQLANAKAQLRRLRQELEEKAELLLDSQAEVQGLEAEIRRLRQEAQALSGQAKRAELYREEAEALRERAGRLPRLQEELRRCRERLQAAEAYKSQLEEERVLSGVLEASKALLEEQLEAARERCARLHETQRENLLLRTRLGEAHAELDSLRHQVDQLAEENVELELELQRSLEPPPGSPGEAPLAGAAPSLQDEVREAEAGRLRTLERENRELRGLLQVLQGQPGGQHPLLEAPREDPVLPVLEEAPQTPVAFDHSPQGLVQKARDGGPQALDLAPPALDSVLEASAECPQAPDSDPQEAESPLQAAAMDPQASDWSPQESGSPVETQESPEKAGRRSSLQSPASVAPPQGPGTKIQAPQLLGGETEGREAPQGELVPEAWGLRQEGPEHKPGPSEPSSVQLEEQEGPNQGLDLATGQAEAREHDQRLEGTVRDPAWQKPQQKSEGALEVQVWEGPIPGESLASGVAEQEALREEVAQLRRKAEALGDELEAQARKLEAQNTEAARLSKELAQARRAEAEAHREAEAQAWEQARLREAVEAAGQELESASQEREALVEALAAAGRERRQWEREGSRLRAQSEAAEERMQVLESEGRQHLEEAERERREKEALQAELEKAVVRGKELGARLEHLQRELEQAALERQEFLREKESQHQRYQGLEQRLEAELQAAATSKEEALMELKTRALQLEEELFQLRQGPAGLGPKKRAEPQLVETQNVRLIEVERSNAMLVAEKAALQGQLQHLEGQLGSLQGRAQELLLQSQRAQEHSSRLQAEKSVLEIQGQELHRKLEVLEEEVRAARQSQEETRGQQQALLRDHKALAQLQRRQEAELEGLLVRHRDLKANMRALELAHRELQGRHEQLQAQRASVEAQEVALLAERERLMQDGHRQRGLEEELRRLQSEHDRAQMLLAELSRERGELQGERGELRGRLARLELERAQLEMQSQQLRESNQQLDLSACRLTTQCELLTQLRSAQEEENRQLLAEVQALSRENRELLERSLESRDHLHREQREYLDQLNALRREKQKLVEKIMDQYRVLEPVPLPRTKKGSWLADKVKRLMRPRREGGPPGGLRLGADGAGSTESLGGPPETELPEGREADGTGSPSPAPMRRAQSSLCLRDETLAGGQRRKLSSRFPVGRSSESFSPGDTPRQRFRQRHPGPLGAPVSHSKGPGVGWENSAETLQEHETDANREGPEVQEPEKRPLTPSLSQ

SEQ ID NO: 77 - DNA, 840 bp, Homo sapiens
actcgccacctcctcttccacccctgccaggcccagcagccaccacagcgcctgcttcctcggccctgaaatcatgcccctaggtctcctgtggctgggcctagccctgttgggggctctgcatgcccaggcccaggactccacctcagacctgatcccagccccacctctgagcaaggtccctctgcagcagaacttccaggacaaccaattccaggggaagtggtatgtggtaggcctggcagggaatgcaattctcagagaagacaaagacccgcaaaagatgtatgccaccatctatgagctgaaagaagacaagagctacaatgtcacctccgtcctgtttaggaaaaagaagtgtgactactggatcaggacttttgttccaggttgccagcccggcgagttcacgctgggcaacattaagagttaccctggattaacgagttacctcgtccgagtggtgagcaccaactacaaccagcatgctatggtgttcttcaagaaagtttctcaaaacagggagtacttcaagatcaccctctacgggagaaccaaggagctgacttcggaactaaaggagaacttcatccgcttctccaaatctctgggcctccctgaaaaccacatcgtcttccctgtcccaatcgaccagtgtatcgacggctgagtgcacaggtgccgccagctgccgcaccagcccgaacaccattgagggagctgggagaccctccccacagtgccacccatgcagctgctccccaggccaccccgctgatggagccccaccttgtctgctaaataaacatgtgccctcaggccaaaaaaaaaaaaaaaaaa

SEQ ID NO: 78 - protein, 198 aa, Homo sapiens
MPLGLLWLGLALLGALHAQAQDSTSDLIPAPPLSKVPLQQNFQDNQFQGKWYVVGLAGNAILREDKDPQKMYATIYELKEDKSYNVTSVLFRKKKCDYWIRTFVPGCQPGEFTLGNIKSYPGLTSYLVRVVSTNYNQHAMVFFKKVSQNREYFKITLYGRTKELTSELKENFIRFSKSLGLPENHIVFPVPIDQCIDG

SEQ ID NO: 79 - DNA, 2224 bp, Homo sapiens
gctgacacctgcccagtggaagctggcatccctccccttgtgggttcagagctgcaagaagcaccaggctcggccacttcagaagccccagcctcgacctagcccaccctctcagggccacagtgcagaagcctgcacacctgccaagtctctccgactccttgcagctgctgtcagcatggcccaggctcctgctgacccgggcagagaaggccaccttgaacaaagaatcctgcaggtgctgacagaggctggctccccggtgaaacttgcccagctggtgaaggaatgccaagcacccaagagggagctcaaccaagtcctctaccgaatgaaaaaggagttgaaagtctccctcacatcccctgccacctggtgcttgggcgggactgatcctgaaggcgagggtcctgcagagctggccttgtccagccctgccgagaggccccagcaacatgcagctacaattccagagacccctggccctcagttcagccaacaacgggaggaagacatctacaggtttctcaaagacaatggtccccagagggccctggtcatcgcccaagcactgggaatgaggacagcaaaagatgtgaaccgagacttgtacaggatgaagagcaggcaccttctggacatggatgagcagtccaaagcatggacgatttaccgcccagaagattctggaagaagagcaaagtcagcctcaattatttaccagcacaatccaatcaacatgatctgccagaatggacccaacagctggatttccattgcaaactccgaagccatccagattggacacgggaacatcattacaagacagacagtctccagggaggacggttccgccggtccacgccacctcccttcaatggcaccaggtgattcctcaacttgggggaccctagttgatccctgggggccccaggacatccacatggagcggtccatactgagacgggtgcagctgggacacagcaatgagatgaggctccacggcgtcccgtccgagggccctgcccacatcccccctggcagccccccagtctctgccactgctgccggcccagaagcttcgtttgaagcaagaattcccagtccaggaactcaccctgagggggaagccgcccagagaatccacatgaaatcgtgctttctcgaggacgccaccatcggcaacagcaacaaaatgtctatcagcccaggggtggctggcccaggaggagtcgcagggtctggagagggggagccaggggaggacgcaggtcgtcgtcccgcagacacacaatccagaagtcactttcctcgagacattggtcagcccatcactcccagccactcgaagctcacccccaagctggaaactatgactcttggaaacaggagtcacaaagctgcagaaggcagccactatgtggatgaagcctcacacgaggggagctggtggggaggtgggatttagtgcacagcctcacgtggggcttggacacaggctgggggtgggcgcatgctagggagactagcctgctgctctctgcattccttagcgtcttgtttgacctgcttgcttccagacataacctgcatgaatcagttttgggggaatggacctggcatggggatgggttcaggccaggtcttttgatggccaggagtagatgacagggagttgccttggggaacctttggtgtgccaagaggaggtgggtagatgggagtggggctcggtcccccaggcccaggggactctctccactctttcctgggctcggggcatctgcctggagttaccttccatcatggctacctgctgtggtttgaatgtttgagtcccaacaaaattcatatcaaaacataatcccaactgggtgcagtggctcacgcctgtaatcccagcactttgggaggccgaggcgggcggatcaataggtcaggaaatccagaccgtcctggctaacatggtgaaaccccgtctctactaaaaaaaaaaatacaaaaaattagccgggcgttgtggcgggcacctggagtcccagctactccggaggctgagggaggagaatggtgtgaacccgggaggtggagcttccagtgagccgagatcgcgccactgcactccaggctgggcgacagagcgagactccgtctcaaaaaaataaatacataaataaaaaataaaccacccataaaaaaaaaaaaaaaaaaaaaaaaaaaaaaa

SEQ ID NO: 80 - protein, 429 aa, Homo sapiens
MAQAPADPGREGHLEQRILQVLTEAGSPVKLAQLVKECQAPKRELNQVLYRMKKELKVSLTSPATWCLGGTDPEGEGPAELALSSPAERPQQHAATIPETPGPQFSQQREEDIYRFLKDNGPQRALVIAQALGMRTAKDVNRDLYRMKSRHLLDMDEQSKAWTIYRPEDSGRRAKSASIIYQHNPINMICQNGPNSWISIANSEAIQIGHGNIITRQTVSREDGSAGPRHLPSMAPGDSSTWGTLVDPWGPQDIHMERSILRRVQLGHSNEMRLHGVPSEGPAHIPPGSPPVSATAAGPEASFEARIPSPGTHPEGEAAQRIHMKSCFLEDATIGNSNKMSISPGVAGPGGVAGSGEGEPGEDAGRRPADTQSRSHFPRDIGQPITPSHSKLTPKLETMTLGNRSHKAAEGSHYVDEASHEGSWWGGGI

SEQ ID NO: 81 - DNA, 2425 bp, Homo sapiens
acgcggggattctgtgtaattcctatccacagtcacttctgttcatttttaatgaaaacctattgctgttattttctattatgagttaacggtgatgtgtgttttttaaattttgtatacttgctctcaccctaaaatataccttaagagacttttcccctgtttttctttctgctttccaagactccaggaaaaacagcttccatggcacattttgtacagggcacatctagaatgattgccgcagaaagttctacggagcataaagagtgtgctgaaccatcaacaagaaagaacttgatgaattctcttgaacaaaagataaggtgtttggaaaaacaaagaaaagagctcctggaagttaaccagcaatgggatcagcaatttagaagtatgaaagagttatatgaaagaaaggtagcagagctgaagacgaaactggacgccgcggaaagattcctcagcacgcgggagaaggatccgcatcagaggcagagaaaggacgacaggcagagagaggacgacaggcagcgcgacctgacccgggaccggctgcagcgggaggagaaggaaaaggaacgcctaaatgaagaattacatgaattgaaagaagagaataaacttttaaagggaaaaaatactcttgcgaacaaggaaaaggaacattacgaatgtgaaataaaacgcctcaataaggctcttcaggatgccttgaatatcaagtgttcattttccgaggactgtttgaggaagtctcgagtggaattctgccatgaggagatgagaacagaaatggaagttctgaagcagcaggtgcaaatatacgaagaagacttcaaaaaggaacgatcggatcgagagagacttaatcaagagaaagaggagctacagcaaattaatgaaacttcccaatcccagttgaacaggctgaattcccagataaaagcttgtcagatggagaaagaaaaactagaaaagcaattaaaacagatgtattgcccaccctgtaactgcggcttggttttccacctgcaagatccatgggtaccaacaggccctggagctgtgcagaagcaacgggagcacccaccagactgtcagtggtatgctcttgaccagcttccgccagatgtacaacacaaggcaaatggtttatcctcagtaaagaaagtccatccgtagaagtacacactaacagagagagacaacaggcaacgagggagcgtggctgaggaccctcttctttgtttatactgaggcttgtttctgccacaaaggcacatcatctaccctgttatttgtgcctggtcatgttttcctttggtatgaatacaggaaaaggcttctgacagctaagatcctgatcaaattggaggagccagttattatacaaccaaatacaacttccagtttccttgaaatgagacttggcagatggatgatgcacgactccctgaaaatctcttcagcatattgctgttggatgcacaaaaatgattctatgatttaggcaactcagtgtttgctgcagggatattgtatgttgatttaaagtgcatatgtgtgtgtgtgtgtgtgtgtgtgtgtgtgtttcctggggtaaaaatttctgcagttgtaaacgtttaacattgctcccattcttcttccacagggccttagttctttagctatttgactacatattgttgacctcagtgatcctaaacgtagaattgaagaggtgtatatacctcgttaaattaaataagtggttcaatctgaataagatggttaattggaagctattccttagacagatcatttctttaagatggtgagaaattgtgcgcctgcatcacaagacttgattatgaaagataaagtcttgggctgggtgcagtggctcatgcctataatcccagcactttgggaggctgaggcaggtggattgctttgaggccaggagttctagaccagcctggccagcatggtgaaaccccatctctactataaatacaaaaattagccaggctcgtggcacacacctataaacccagctactcaggaggcttgaggcgggaggatcacttgagcccagggaggcagaggttgctgtaagttgagatcgccactgcactccagcctgggaaatagagtgagcaagactcagtgccccctacccacccactccacaccaccaaaaaaaaaaaaaaaaaaaaaaggaagacaaagtcctgatgggatgatgatggctatatggctatgctgtgtccatatatacttacagaaatatttcagacatatggatttatagttaaatctgtgtttttccttcctatggatttgattaattttaatgaaaaacttaattctgactcctcaagccaattaaaatgaaaatggaatttatttaaaaaaaaaaaaaaaaaaaaaaaaaaaaaaa

SEQ ID NO: 82 - protein, 325 aa, Homo sapiens
MAHFVQGTSRMIAAESSTEHKECAEPSTRKNLMNSLEQKIRCLEKQRKELLEVNQQWDQQFRSMKELYERKVAELKTKLDAAERFLSTREKDPHQRQRKDDRQREDDRQRDLTRDRLQREEKEKERLNEELHELKEENKLLKGKNTLANKEKEHYECEIKRLNKALQDALNIKCSFSEDCLRKSRVEFCHEEMRTEMEVLKQQVQIYEEDFKKERSDRERLNQEKEELQQINETSQSQLNRLNSQIKACQMEKEKLEKQLKQMYCPPCNCGLVFHLQDPWVPTGPGAVQKQREHPPDCQWYALDQLPPDVQHKANGLSSVKKVHP

SEQ ID NO: 83 - DNA, 2737 bp, Homo sapiens
agtgcctcaccaccacctgcccgcgcgccgccccatataaaggcgccgccgtccttacccccaggactcggccccatggagacgccgccggccgccgctggcgcatggcgggtaggagctgtggcgcggggccttccaggagtctgagctatgagtggcccctgtggagagaagcctgtcctggaagccagccccaccatgagtctgtgggaatttgaggacagccacagccgtcagggcaccccaaggccgggtcaagagctggccgctgaggaggcctcggccctggaactgcagatgaaggtggacttcttccggaagctgggctattcatccacggagatccacagcgtcctgcagaagctgggcgtccaggcagacaccaacacggtgctgggtgagctggtgaaacacgggacagccaccgagcgggagcgccagacctcaccggacccctgccctcagctccctctagtcccgcggggtggtggcacccctaaggctcccaacctggagcctccactcccagaagaggaaaaggagggcagcgacctgagaccagtggtcatcgatgggagcaacgtggccatgagccatgggaacaaggaggtcttctcctgccggggcatcctgctggcagtgaactggtttctggagcggggccacacagacatcacagtgtttgtgccatcctggaggaaggagcagcctcggcccgacgtgcccatcacagaccagcacatcctgcgggaactggagaagaagaagatcctggtgttcacaccatcacgacgcgtgggtggcaagcgggtggtgtgctatgacgacagattcattgtgaagctggcctacgagtctgacgggatcgtggtttccaacgacacataccgtgacctccaaggcgagcggcaggagtggaagcgcttcatcgaggagcggctgctcatgtactccttcgtcaatgacaagtttatgccccctgatgacccactgggccggcacgggcccagcctggacaacttcctgcgtaagaagccactcactttggagcacaggaagcagccgtgtccctatggaaggaaatgcacctatgggatcaagtgccgattcttccacccagagcggccaagctgcccccagcgctctgtggcagatgagctccgtgccaatgctctcctctcaccccccagagccccaagcaaggacaaaaatggccggcggccttcaccttcatcccagtccagctctctgctaacagagagtgagcagtgcagcctggatgggaagaagctgggggcccaggcatccccagggtcccgccaagagggtctaacacagacctatgccccatcaggcaggagcctcgcacctagcgggggcagtggcagcagctttgggcccacagactggctcccacagacgctggactcactcccgtacgtctcccaggattgcctggactcgggcattggctccctggagagccagatgtcggaactttggggggttcgaggaggaggccctggtgagccgggcccaccccgagccccttacacgggctacagtccctatggatctgagctcccagccaccgcagccttctctgcctttggccgggccatgggtgctggccacttcagtgtccctgccgactacccacccgcgccccctgcctttccacctcgagagtactggtctgaaccatacccactgcccccacccacatcagtccttcaggagcccccagtgcagagcccaggggctggcaggagcccgtggggcagggcaggcagcctggccaaggagcaggccagcgtgtatactaagctgtgtggtgtgtttcccccgcacctggtggaggctgtgatggggcgcttcccacagctcctggacccccagcagctggctgccgagatcctctcctacaagtcccagcaccccagtgagtaagctgcctgtggctggcaagggcagcacccccagcctccaagggccgtcaggctgggctttgggccattgagcagcccattcccagccctgaggcccaccccagaggctggacagagggaggattcaagtcgggaaggaaacccacaaaccaaagatactgtaggattggttctggcccatgcagcacctctagctgtctgcctcagtgggtcagaagcgatcaccctgttgatacacattgtatctctgtagtttaaggagacgctgccggtaacggcgtcggtccgtggctgaggcccaaaccgtcttttctctcagagggtggggagggaggtgggggcagcagaggcctgggctgggtgccctgtgcacgccaccccacttccgccctacccctgggacgttggccttggctggctagttgggcaccgtgtgcctgccctccaagggcctcctctacgccaatgaggcctcatctgtgctctcgctgggcacgtggcttcatgtcagtaagcaagatgcttcttaataacccaccttctgccccactctattccttatcctgctgcccctgtaggggtcaagggccctccgtctacaccctcttcttctcctccatcctttattcagagtcatctcgcccttccccatgggtgggggaacctgtgtttgtttgtgtgcacatgtaaattttaaatattttaagcagaaagtccttacctcctgtaacacatcaataaagtacaatcattgtgagccctttcaaaaaaaaaaaaaaaaaaaaaaa

SEQ ID NO: 84 - protein, 599 aa, Homo sapiens
MSGPCGEKPVLEASPTMSLWEFEDSHSRQGTPRPGQELAAEEASALELQMKVDFFRKLGYSSTEIHSVLQKLGVQADTNTVLGELVKHGTATERERQTSPDPCPQLPLVPRGGGTPKAPNLEPPLPEEEKEGSDLRPVVIDGSNVAMSHGNKEVFSCRGILLAVNWFLERGHTDITVFVPSWRKEQPRPDVPITDQHILRELEKKKILVFTPSRRVGGKRVVCYDDRFIVKLAYESDGIVVSNDTYRDLQGERQEWKRFIEERLLMYSFVNDKFMPPDDPLGRHGPSLDNFLRKKPLTLEHRKQPCPYGRKCTYGIKCRFFHPERPSCPQRSVADELRANALLSPPRAPSKDKNGRRPSPSSQSSSLLTESEQCSLDGKKLGAQASPGSRQEGLTQTYAPSGRSLAPSGGSGSSFGPTDWLPQTLDSLPYVSQDCLDSGIGSLESQMSELWGVRGGGPGEPGPPRAPYTGYSPYGSELPATAAFSAFGRAMGAGHFSVPADYPPAPPAFPPREYWSEPYPLPPPTSVLQEPPVQSPGAGRSPWGRAGSLAKEQASVYTKLCGVFPPHLVEAVMGRFPQLLDPQQLAAEILSYKSQHPSE

SEQ ID NO: 85 - DNA, 1867 bp, Homo sapiens
cacatagctcagttcccataaaagggctggtttgccgcgtcggggagtggagtgggacaggtatataaaggaagtacagggcctggggaagaggccctgtctaggtagctggcaccaggagccgtgggcaagggaagaggccacaccctgccctgctctgctgcagccagaatgggtgtgaaggcgtctcaaacaggctttgtggtcctggtgctgctccagtgctgctctgcatacaaactggtctgctactacaccagctggtcccagtaccgggaaggcgatgggagctgcttcccagatgcccttgaccgcttcctctgtacccacatcatctacagctttgccaatataagcaacgatcacatcgacacctgggagtggaatgatgtgacgctctacggcatgctcaacacactcaagaacaggaaccccaacctgaagactctcttgtctgtcggaggatggaactttgggtctcaaagattttccaagatagcctccaacacccagagtcgccggactttcatcaagtcagtaccgccatttctgcgcacccatggctttgatgggctggaccttgcctggctctaccctggacggagagacaaacagcattttaccaccctaatcaaggaaatgaaggccgaatttataaaggaagcccagccagggaaaaagcagctcctgctcagcgcagcactgtctgcggggaaggtcaccattgacagcagctatgacattgccaagatatcccaacacctggatttcattagcatcatgacctacgattttcatggagcctggcgtgggaccacaggccatcacagtcccctgttccgaggtcaggaggatgcaagtcctgacagattcagcaacactgactatgctgtggggtacatgttgaggctgggggctcctgccagtaagctggtgatgggcatccccaccttcgggaggagcttcactctggcttcttctgagactggtgttggagccccaatctcaggaccgggaattccaggccggttcaccaaggaggcagggacccttgcctactatgagatctgtgacttcctccgcggagccacagtccatagaatcctcggccagcaggtcccctatgccaccaagggcaaccagtgggtaggatacgacgaccaggaaagcgtcaaaagcaaggtgcagtacctgaaggacaggcagctggcgggcgccatggtatgggccctggacctggatgacttccagggctccttctgcggccaggatctgcgcttccctctcaccaatgccatcaaggatgcactcgctgcaacgtagccctctgttctgcacacagcacgggggccaaggatgccccgtccccctctggctccagctggccgggagcctgatcacctgccctgctgagtcccaggctgagcctcagtctccctcccttggggcctatgcagaggtccacaacacacagatttgagctcagccctggtgggcagagaggtagggatggggctgtggggatagtgaggcatcgcaatgtaagactcgggattagtacacacttgttgattaatggaaatgtttacagatccccaagcctggcaagggaatttcttcaactccctgccccccagccctccttatcaaaggacaccattttggcaagctctatcaccaaggagccaaacatcctacaagacacagtgaccatactaattataccccctgcaaagcccagcttgaaaccttcacttaggaacgtaatcgtgtcccctatcctacttccccttcctaattccacagctgctcaataaagtacaagagcttaacagtgaaaaaaaaaaaaaaaaaaaaaaaaaaaaaa

SEQ ID NO: 86 - protein, 383 aa, Homo sapiens
MGVKASQTGFVVLVLLQCCSAYKLVCYYTSWSQYREGDGSCFPDALDRFLCTHIIYSFANISNDHIDTWEWNDVTLYGMLNTLKNRNPNLKTLLSVGGWNFGSQRFSKIASNTQSRRTFIKSVPPFLRTHGFDGLDLAWLYPGRRDKQHFTTLIKEMKAEFIKEAQPGKKQLLLSAALSAGKVTIDSSYDIAKISQHLDFISIMTYDFHGAWRGTTGHHSPLFRGQEDASPDRFSNTDYAVGYMLRLGAPASKLVMGIPTFGRSFTLASSETGVGAPISGPGIPGRFTKEAGTLAYYEICDFLRGATVHRILGQQVPYATKGNQWVGYDDQESVKSKVQYLKDRQLAGAMVWALDLDDFQGSFCGQDLRFPLTNAIKDALAAT

SEQ ID NO: 87 - DNA, 2406 bp, Homo sapiens
gattctgtgtgtgtcctcagatgctcagccacagacctttgagggagtaaagggggcagacccacccaccttgcctccaggctctttccttcctggtcctgttctatggtggggctcccttgccagacttcagactgagaagtcagatgaagtttcaagaaaaggaaattggtgggtgacagagatgggtggaggggctggggaaaggctgtttacttcctcctgtctagtcggtttggtccctttagggctccggatatctttggtgacttgtccactccagtgtggcatcatgtggcagctgctcctcccaactgctctgctacttctagtttcagctggcatgcggactgaagatctcccaaaggctgtggtgttcctggagcctcaatggtacagggtgctcgagaaggacagtgtgactctgaagtgccagggagcctactcccctgaggacaattccacacagtggtttcacaatgagagcctcatctcaagccaggcctcgagctacttcattgacgctgccacagtcgacgacagtggagagtacaggtgccagacaaacctctccaccctcagtgacccggtgcagctagaagtccatatcggctggctgttgctccaggcccctcggtgggtgttcaaggaggaagaccctattcacctgaggtgtcacagctggaagaacactgctctgcataaggtcacatatttacagaatggcaaaggcaggaagtattttcatcataattctgacttctacattccaaaagccacactcaaagacagcggctcctacttctgcagggggctttttgggagtaaaaatgtgtcttcagagactgtgaacatcaccatcactcaaggtttggcagtgtcaaccatctcatcattctttccacctgggtaccaagtctctttctgcttggtgatggtactcctttttgcagtggacacaggactatatttctctgtgaagacaaacattcgaagctcaacaagagactggaaggaccataaatttaaatggagaaaggaccctcaagacaaatgacccccatcccatgggggtaataagagcagtagcagcagcatctctgaacatttctctggatttgcaaccccatcatcctcaggcctctctacaagcagcaggaaacatagaactcagagccagatcccttatccaactctcgacttttccttggtctccagtggaagggaaaagcccatgatcttcaagcagggaagccccagtgagtagctgcattcctagaaattgaagtttcagagctacacaaacactttttctgtcccaaccgttccctcacagcaaagcaacaatacaggctagggatggtaatcctttaaacatacaaaaattgctcgtgttataaattacccagtttagaggggaaaaaaaaacaattattcctaaataaatggataagtagaattaatggttgaggcaggaccatacagagtgtgggaactgctggggatctagggaattcagtgggaccaatgaaagcatggctgagaaatagcaggtagtccaggatagtctaagggaggtgttcccatctgagcccagagataagggtgtcttcctagaacattagccgtagtggaattaacaggaaatcatgagggtgacgtagaattgagtcttccaggggactctatcagaactggaccatctccaagtatataacgatgagtcctcttaatgctaggagtagaaaatggtcctaggaaggggactgaggattgcggtggggggtggggtggaaaagaaagtacagaacaaaccctgtgtcactgtcccaagttgctaagtgaacagaactatctcagcatcagaatgagaaagcctgagaagaaagaaccaaccacaagcacacaggaaggaaagcgcaggaggtgaaaatgctttcttggccagggtagtaagaattagaggttaatgcagggactgtaaaaccaccttttctgcttcaatatctaattcctgtgtagctttgttcattgcatttattaaacaaatgttgtataaccaatactaaatgtactactgagcttcgctgagttaagttatgaaactttcaaatccttcatcatgtcagttccaatgaggtggggatggagaagacaattgttgcttatgaaagaaagctttagctgtctctgttttgtaagctttaagcgcaacatttcttggttccaataaagcattttacaagatcttgcatgctactcttagatagaagatgggaaaaccatggtaataaaatatgaatgataaaaaaaaaaaaaaaaaaaaaaaaaaaaaaaaaaaaaaaaaaaaaaaaaaaaaaaaaaaaaaaaaaaaaaaaaaaaaaaaaaaaaaaaaaaaaaaaaaaa

SEQ ID NO: 88 - protein, 290 aa, Homo sapiens
MGGGAGERLFTSSCLVGLVPLGLRISLVTCPLQCGIMWQLLLPTALLLLVSAGMRTEDLPKAVVFLEPQWYRVLEKDSVTLKCQGAYSPEDNSTQWFHNESLISSQASSYFIDAATVDDSGEYRCQTNLSTLSDPVQLEVHIGWLLLQAPRWVFKEEDPIHLRCHSWKNTALHKVTYLQNGKGRKYFHHNSDFYIPKATLKDSGSYFCRGLFGSKNVSSETVNITITQGLAVSTISSFFPPGYQVSFCLVMVLLFAVDTGLYFSVKTNIRSSTRDWKDHKFKWRKDPQDK

SEQ ID NO: 89 - DNA, 7133 bp, Homo sapiens
aaagtcagagtactgggagaacagaagacttcacaatttaatgcctcagtttttaaaaaaggatccttacacttcatgtctcctagccatcagaagaggaatgagacagcaaaagttcaaatggcctgtttcaagtttctgatataaaacgatgacattttcaggaaaatcctgcatttccagagagagactggctggttaaatttctgaaagaggacaccagctaaaagaaggtattgcatctcacccgagcagactgtgtctgtggaaagtgtaagccccttgccagaagagcagcttcccagcaaaggcagagggtgaaaacagcaaaggtcttaagacactggggacctagagtcaaaagggacctcctccagggaaaacgctgtgtgagaaatggcctcattcggtgactgtgagtgacacagcagaaagttgggtcattccggctgcttttttgagaagtccctgaagagatcaataacagcaagagggaacctggcaaggaagctattcctataatccaggaaagagatgaggaaggcttggaccaggtggtagtggtgtcaggtagtcaaatgctgggtatattttgaagatacaccccataggatttgctccacattgaatgtggaatgctggaagagagataaagtgtacctgtcacatactttttgagttttatttattttcttagaagtaagtacacaaagagatgctacctaggagaagggtattcttttcactattctttcaaattttctgtatgttcgaacattttcatagtagaaagttggggggaaaatctgtttcataaacatttcctcagcagcagtccagtctattgcattttaattggttgtgatatcattgttttatgcaatacgttctcaacaagtatatcctccggcaaactgaacaaggaccaagtctgttctgcctacagctctgcttcctcatagctgctttccagaacgtgactcttgcaaattatcaagaaaggggaactaatctaagggatccagatcaaacagcctcatgaagacttattttatgtttctaatataaagatagaagttttcagaaaagccctgctacacagaggatcagagcaggggtgggcctgctgggctgcagctgggattctgagcatcctttcccggaggcacggaaagtgagtgagtgagcccagtgaggaagaagttgaagctttgatatgagtaaacaagtatctctacctgaaatgattaaagactggaccaaagagcatgtgaaaaaatgggtaaatgaagaccttaagattaatgagcaatacgggcaaattctgctcagtgaagaagtaacaggattagtcctgcaggaattaactgagaaggaccttgtagaaatggggctaccatggggtccagcacttttgataaaacgttcatacaacaaattgaatagtaagtcccctgaaagtgacaatcatgatccgggacaattagataattcaaaaccgtccaaaacagaacaccagaaaaatccaaaacacaccaaaaaggaagaagaaaattcaatgtcatctaatattgattatgatcccagagagatcagagatatcaaacaagaagaatcaattcttatgaaagaaaatgtgttagatgaagtagcaaatgctaaacacaagaaaaagggtaagctaaaacctgaacaattgacttgtatgccatatccttttgatcagttccatgacagccatcgctacatagaacattatactctacaacctgaaacaggagcactcaatctcattgatccaatacatgagttcaaagctctcacaaacacagaaacagccacggaagtggacattaagatgaaattcagcaatgaagtcttccgatttgcatcagcttgtatgaattcacgcaccaatggcaccatccattttggagtcaaggacaaaccccatggagaaattgttggtgtgaaaatcaccagtaaggctgccttcattgaccacttcaatgtaatgatcaaaaagtattttgaagaaagtgagatcaatgaagccaagaagtgtattcgggagccaaggtttgtggaagtccttctgcagaacaatacaccatctgacagatttgtcattgaagttgatactattccaaaacactctatatgtaatgataagtatttctacattcagatgcaaatttgtaaagataaaatatggaaacaaaaccaaaatctttcactgtttgtaagagaaggggctagctctagggatatcctggccaattccaagcaacgggatgtagatttcaaggcatttttacaaaatttaaagtcactggtagcatctagaaaagaggctgaagaagagtatggaatgaaggcaatgaagaaggagagtgaaggactaaagctggttaaacttctcataggaaaccgagactcactggataattcatactatgactggtacattcttgtaacaaataaatgccatccaaaccaaataaagcacttagattttttaaaagaaattaaatggtttgctgtgttggagtttgatcctgaatctatgatcaatggagtggtcaaagcttacaaagaaagtcgggtggcaaaccttcactttccaaatcaatatgaagacaagacaactaacatgtgggagaagatttctactcttaatctttaccaacagcccagctggattttctgcaacggcagatcagacctgaaaagcgagacatataaacctctagaaccacatttatggcagagagaaagagcttcagaagtcaggaaactaattttatttctcacagatgaaaatataatgacaagaggaaaatttttggtagtgtttctattactctcttcagtggaaagcccaggagatccactcattgaaactttctgggctttctatcaagctctcaaaggaatggaaaatatgttgtgtatctctgtaaactcacatatttatcaacgatggaaagatctactacaaacaagaatgaagatggaagatgaactaacaaaccacagtatttccactttaaatatagaactggtaaacagcactatccttaaactaaaatcggtgactcggtcatcaagaaggtttttgcccgcccgtggatcttcttcagttatcctagagaaaaagaaagaggatgtcttgactgcactggaaatcctctgtgaaaatgagtgtacagagacagacatcgagaaagacaaatctaaattcctggagtttaagaaatcaaaagaagaacacttttatcgaggtggcaaagtatcctggtggaacttctatttttcttctgaaaactattcttcagattttgttaaaagggacagttatgaaaagcttaaagatttaatacactgctgggcagagtctcctaaaccaatatttgcaaaaatcatcaatctttatcatcatccaggctgtggaggtaccacactggctatgcatgttctctgggacttaaagaaaaacttcagatgtgctgtgttaaaaaacaagacaactgattttgcagaaattgcagagcaagtgatcaatctggtcacctatagggcaaagagccatcaggattacattcctgtgcttctccttgtggatgattttgaagaacaagaaaatgtctactttctacaaaatgccatccattccgttttagcagaaaaggatttgcgatatgaaaaaacattggtaattatcttaaactgcatgagatcccggaatccagatgaaagtgcaaaattggcagacagtattgcactaaattaccaactttcttccaaggaacaaagagcttttggtgccaaactgaaggaaattgaaaagcagcacaagaactgtgaaaacttttattccttcatgatcatgaaaagcaattttgatgaaacatatatagaaaatgtagtcaggaatatcctaaaaggacaggatgttgacagcaaggaagcacaactcatttccttcctggctttactcagctcttatgttactgactctacaatttcagtttcacagtgtgaaatatttttgggaatcatatacactagtacaccctgggaacctgaaagcttagaagacaagatgggaacttattctacacttctaataaaaacagaagttgcagaatatgggagatacacaggtgtgcgtatcattcaccctctgattgccctgtactgtctaaaagaactggaaagaagctatcacttggataaatgtcaaattgcattgaatatattagaagagaatttattctatgattctggaataggaagagacaaatttcaacatgatgttcaaactcttctgcttacaagacagcgcaaggtgtatggagatgaaacagacactctgttttccccattaatggaagctttacagaataaagacattgaaaaggtcttgagtgcaggaagtagacgattcccacaaaatgcattcatttgtcaagccttagcaagacatttctacattaaagagaaggactttaacacagctctggactgggcacgtcaggccaaaatgaaagcacctaaaaattcctatatttcagatacactaggtcaagtctacaaaagtgaaatcaaatggtggttggatgggaacaaaaactgtaggagcattactgttaatgacctaacacatctcctagaagctgcggaaaaagcctcaagagctttcaaagaatcccaaaggcaaactgatagtaaaaactatgaaaccgagaactggtcaccacagaagtcccagagacgatatgacatgtataacacagcttgtttcttgggtgaaatagaagttggtctttacactatccagattcttcagctcactccctttttccacaaagaaaatgaattatccaaaaaacatatggtgcaatttttatcaggaaagtggaccattcctcctgatcccagaaatgaatgttatttggctcttagcaagttcacatcccacctaaaaaatttacaatcagatctgaaaaggtgctttgacttttttattgattatatggttcttctgaaaatgaggtatacccaaaaagaaattgcagaaatcatgttaagcaagaaagtcagtcgttgtttcaggaaatacacagaacttttctgtcatttggatccatgtctattacaaagtaaagagagtcaattactccaggaggagaattgcaggaaaaagctagaagctctgagagcagataggtttgctggactcttggaatatcttaatccaaactacaaagatgctaccaccatggaaagtatagtgaatgaatatgccttcctactgcagcaaaactcaaaaaagcccatgacaaatgagaaacaaaattccattttggccaacattattctgagttgtctaaagcccaactccaagttaattcaaccacttaccacgctaaaaaaacaactccgagaggtcttgcaatttgtaggactaagtcatcaatatccaggtccttatttcttggcctgcctcctgttctggccagaaaatcaagagctagatcaagattccaaactaatagaaaagtatgtttcatccttaaatagatccttcaggggacagtacaagcgcatgtgcaggtccaagcaggcaagcacacttttctatctgggcaaaaggaagggtctaaacagtattgttcacaaggccaaaatagagcagtactttgataaagcacaaaatacaaattccctctggcacagtggggatgtgtggaaaaaaaatgaagtcaaagacctcctgcgtcgtctaactggtcaggctgaaggcaagctaatctctgtagaatatggaacagaggaaaaaataaaaataccagtaatatctgtttattcaggtccactcagaagtggtaggaacatagaaagagtgtctttctacctaggattttccattgaaggccctctggcatatgatatagaagtaatttaagacaatacatcacctgtagttcaaatacgtttatttatatctttatgattttattctctctctctattctcatggcactttcataacattatggctaacctctaattacagattttgcttttgcctccctgaatgaattacaagcctttttaagatatgaaatatgcctacccgcagagcttggcacaaagtggagtcaatcttttaatgttttaaatatgcattttcagactcaaataattaagaagtttcattgatatccactggtcacatcataactgtctatagggcaataaaatctgtgttaaactcaattgcttttataagttttctaaattatttcttcactgtgacagcaaagatttaaataagatgaatgtaaaagagaaagcttattggactcaaacccacagatccacaccagagttctatttacctcatcttggtatcaataaaaacttatgtggaaggtaaatatattgttccccatccaccacataacactctccccaacacacacacacacacacacacacacacacacacacacacacactccttgtaccccttgcccttctcccagctcattgctccaggagagagaagagttcaaaaaataaagtaatcataaacttgaactctctccattctcttgttcccatttacaggtgaatctcttcctttaagccatttttgtctcctgtgaatacagccttatctccacctgtttcttagatcccatctcccctggcttattttttccattcattaccctctttgttccctttacttctcaacctgtgctatatacatgctgttctctctgttgagattgccttatttccatctaacattctctctcctgctattctgatttgtcattcacaactgatttcaagagtcaccttcaccaggaagtcttccttgaccaccatcattcctgcctgattagagggcttcctcatggtaatatgtgttctcaagttttcagtgtcaaggaatgccatcccagaagctcattctcagatgcacaacagccagaacagtctcaagcagcattctagagcttggaatttaagaactacgcattgcctataaagtgaaacataggctaatatagattaaattgaatattgaataaaaaatatatttatttatccac

SEQ ID NO: 90 - protein, 1584 aa, Homo sapiens
MSKQVSLPEMIKDWTKEHVKKWVNEDLKINEQYGQILLSEEVTGLVLQELTEKDLVEMGLPWGPALLIKRSYNKLNSKSPESDNHDPGQLDNSKPSKTEHQKNPKHTKKEEENSMSSNIDYDPREIRDIKQEESILMKENVLDEVANAKHKKKGKLKPEQLTCMPYPFDQFHDSHRYIEHYTLQPETGALNLIDPIHEFKALTNTETATEVDIKMKFSNEVFRFASACMNSRTNGTIHFGVKDKPHGEIVGVKITSKAAFIDHFNVMIKKYFEESEINEAKKCIREPRFVEVLLQNNTPSDRFVIEVDTIPKHSICNDKYFYIQMQICKDKIWKQNQNLSLFVREGASSRDILANSKQRDVDFKAFLQNLKSLVASRKEAEEEYGMKAMKKESEGLKLVKLLIGNRDSLDNSYYDWYILVTNKCHPNQIKHLDFLKEIKWFAVLEFDPESMINGVVKAYKESRVANLHFPNQYEDKTTNMWEKISTLNLYQQPSWIFCNGRSDLKSETYKPLEPHLWQRERASEVRKLILFLTDENIMTRGKFLVVFLLLSSVESPGDPLIETFWAFYQALKGMENMLCISVNSHIYQRWKDLLQTRMKMEDELTNHSISTLNIELVNSTILKLKSVTRSSRRFLPARGSSSVILEKKKEDVLTALEILCENECTETDIEKDKSKFLEFKKSKEEHFYRGGKVSWWNFYFSSENYSSDFVKRDSYEKLKDLIHCWAESPKPIFAKIINLYHHPGCGGTTLAMHVLWDLKKNFRCAVLKNKTTDFAEIAEQVINLVTYRAKSHQDYIPVLLLVDDFEEQENVYFLQNAIHSVLAEKDLRYEKTLVIILNCMRSRNPDESAKLADSIALNYQLSSKEQRAFGAKLKEIEKQHKNCENFYSFMIMKSNFDETYIENVVRNILKGQDVDSKEAQLISFLALLSSYVTDSTISVSQCEIFLGIIYTSTPWEPESLEDKMGTYSTLLIKTEVAEYGRYTGVRIIHPLIALYCLKELERSYHLDKCQIALNILEENLFYDSGIGRDKFQHDVQTLLLTRQRKVYGDETDTLFSPLMEALQNKDIEKVLSAGSRRFPQNAFICQALARHFYIKEKDFNTALDWARQAKMKAPKNSYISDTLGQVYKSEIKWWLDGNKNCRSITVNDLTHLLEAAEKASRAFKESQRQTDSKNYETENWSPQKSQRRYDMYNTACFLGEIEVGLYTIQILQLTPFFHKENELSKKHMVQFLSGKWTIPPDPRNECYLALSKFTSHLKNLQSDLKRCFDFFIDYMVLLKMRYTQKEIAEIMLSKKVSRCFRKYTELFCHLDPCLLQSKESQLLQEENCRKKLEALRADRFAGLLEYLNPNYKDATTMESIVNEYAFLLQQNSKKPMTNEKQNSILANIILSCLKPNSKLIQPLTTLKKQLREVLQFVGLSHQYPGPYFLACLLFWPENQELDQDSKLIEKYVSSLNRSFRGQYKRMCRSKQASTLFYLGKRKGLNSIVHKAKIEQYFDKAQNTNSLWHSGDVWKKNEVKDLLRRLTGQAEGKLISVEYGTEEKIKIPVISVYSGPLRSGRNIERVSFYLGFSIEGPLAYDIEVI

SEQ ID NO: 91 - DNA, 2387 bp, Homo sapiens
agacacctctgccctcaccatgagcctctggcagcccctggtcctggtgctcctggtgctgggctgctgctttgctgcccccagacagcgccagtccacccttgtgctcttccctggagacctgagaaccaatctcaccgacaggcagctggcagaggaatacctgtaccgctatggttacactcgggtggcagagatgcgtggagagtcgaaatctctggggcctgcgctgctgcttctccagaagcaactgtccctgcccgagaccggtgagctggatagcgccacgctgaaggccatgcgaaccccacggtgcggggtcccagacctgggcagattccaaacctttgagggcgacctcaagtggcaccaccacaacatcacctattggatccaaaactactcggaagacttgccgcgggcggtgattgacgacgcctttgcccgcgccttcgcactgtggagcgcggtgacgccgctcaccttcactcgcgtgtacagccgggacgcagacatcgtcatccagtttggtgtcgcggagcacggagacgggtatcccttcgacgggaaggacgggctcctggcacacgcctttcctcctggccccggcattcagggagacgcccatttcgacgatgacgagttgtggtccctgggcaagggcgtcgtggttccaactcggtttggaaacgcagatggcgcggcctgccacttccccttcatcttcgagggccgctcctactctgcctgcaccaccgacggtcgctccgacggcttgccctggtgcagtaccacggccaactacgacaccgacgaccggtttggcttctgccccagcgagagactctacacccaggacggcaatgctgatgggaaaccctgccagtttccattcatcttccaaggccaatcctactccgcctgcaccacggacggtcgctccgacggctaccgctggtgcgccaccaccgccaactacgaccgggacaagctcttcggcttctgcccgacccgagctgactcgacggtgatggggggcaactcggcgggggagctgtgcgtcttccccttcactttcctgggtaaggagtactcgacctgtaccagcgagggccgcggagatgggcgcctctggtgcgctaccacctcgaactttgacagcgacaagaagtggggcttctgcccggaccaaggatacagtttgttcctcgtggcggcgcatgagttcggccacgcgctgggcttagatcattcctcagtgccggaggcgctcatgtaccctatgtaccgcttcactgaggggccccccttgcataaggacgacgtgaatggcatccggcacctctatggtcctcgccctgaacctgagccacggcctccaaccaccaccacaccgcagcccacggctcccccgacggtctgccccaccggaccccccactgtccacccctcagagcgccccacagctggccccacaggtcccccctcagctggccccacaggtccccccactgctggcccttctacggccactactgtgcctttgagtccggtggacgatgcctgcaacgtgaacatcttcgacgccatcgcggagattgggaaccagctgtatttgttcaaggatgggaagtactggcgattctctgagggcagggggagccggccgcagggccccttccttatcgccgacaagtggcccgcgctgccccgcaagctggactcggtctttgaggagcggctctccaagaagcttttcttcttctctgggcgccaggtgtgggtgtacacaggcgcgtcggtgctgggcccgaggcgtctggacaagctgggcctgggagccgacgtggcccaggtgaccggggccctccggagtggcagggggaagatgctgctgttcagcgggcggcgcctctggaggttcgacgtgaaggcgcagatggtggatccccggagcgccagcgaggtggaccggatgttccccggggtgcctttggacacgcacgacgtcttccagtaccgagagaaagcctatttctgccaggaccgcttctactggcgcgtgagttcccggagtgagttgaaccaggtggaccaagtgggctacgtgacctatgacatcctgcagtgccctgaggactagggctcccgtcctgctttggcagtgccatgtaaatccccactgggaccaaccctggggaaggagccagtttgccggatacaaactggtattctgttctggaggaaagggaggagtggaggtgggctgggccctctcttctcacctttgttttttgttggagtgtttctaataaacttggattctctaacctttaaaaaaaaaaaaaaaaaaaaaaaaaaaaaaaaaaaaaaaaaaaaaaaaaaaa

SEQ ID NO: 92 - protein, 707 aa, Homo sapiens
MSLWQPLVLVLLVLGCCFAAPRQRQSTLVLFPGDLRTNLTDRQLAEEYLYRYGYTRVAEMRGESKSLGPALLLLQKQLSLPETGELDSATLKAMRTPRCGVPDLGRFQTFEGDLKWHHHNITYWIQNYSEDLPRAVIDDAFARAFALWSAVTPLTFTRVYSRDADIVIQFGVAEHGDGYPFDGKDGLLAHAFPPGPGIQGDAHFDDDELWSLGKGVVVPTRFGNADGAACHFPFIFEGRSYSACTTDGRSDGLPWCSTTANYDTDDRFGFCPSERLYTQDGNADGKPCQFPFIFQGQSYSACTTDGRSDGYRWCATTANYDRDKLFGFCPTRADSTVMGGNSAGELCVFPFTFLGKEYSTCTSEGRGDGRLWCATTSNFDSDKKWGFCPDQGYSLFLVAAHEFGHALGLDHSSVPEALMYPMYRFTEGPPLHKDDVNGIRHLYGPRPEPEPRPPTTTTPQPTAPPTVCPTGPPTVHPSERPTAGPTGPPSAGPTGPPTAGPSTATTVPLSPVDDACNVNIFDAIAEIGNQLYLFKDGKYWRFSEGRGSRPQGPFLIADKWPALPRKLDSVFEERLSKKLFFFSGRQVWVYTGASVLGPRRLDKLGLGADVAQVTGALRSGRGKMLLFSGRRLWRFDVKAQMVDPRSASEVDRMFPGVPLDTHDVFQYREKAYFCQDRFYWRVSSRSELNQVDQVGYVTYDILQCPED

SEQ ID NO: 93 - DNA, 1147 bp, Homo sapiens
accaaatcaaccataggtccaagaacaattgtctctggacggcagctatgcgactcaccgtgctgtgtgctgtgtgcctgctgcctggcagcctggccctgccgctgcctcaggaggcgggaggcatgagtgagctacagtgggaacaggctcaggactatctcaagagattttatctctatgactcagaaacaaaaaatgccaacagtttagaagccaaactcaaggagatgcaaaaattctttggcctacctataactggaatgttaaactcccgcgtcatagaaataatgcagaagcccagatgtggagtgccagatgttgcagaatactcactatttccaaatagcccaaaatggacttccaaagtggtcacctacaggatcgtatcatatactcgagacttaccgcatattacagtggatcgattagtgtcaaaggctttaaacatgtggggcaaagagatccccctgcatttcaggaaagttgtatggggaactgctgacatcatgattggctttgcgcgaggagctcatggggactcctacccatttgatgggccaggaaacacgctggctcatgcctttgcgcctgggacaggtctcggaggagatgctcacttcgatgaggatgaacgctggacggatggtagcagtctagggattaacttcctgtatgctgcaactcatgaacttggccattctttgggtatgggacattcctctgatcctaatgcagtgatgtatccaacctatggaaatggagatccccaaaattttaaactttcccaggatgatattaaaggcattcagaaactatatggaaagagaagtaattcaagaaagaaatagaaacttcaggcagaacatccattcattcattcattggattgtatatcattgttgcacaatcagaattgataagcactgttcctccactccatttagcaattatgtcacccttttttattgcagttggtttttgaatgtctttcactccttttaaggataaactcctttatggtgtgactgtgtcttattcatctatacttgcagtgggtagatgtcaataaatgttacatacacaaataaataaaatgtttattccatggtaaatttaaaaaaaaaaaaaaaaaaaaaaaaaaaaa

SEQ ID NO: 94 - protein, 267 aa, Homo sapiens
MRLTVLCAVCLLPGSLALPLPQEAGGMSELQWEQAQDYLKRFYLYDSETKNANSLEAKLKEMQKFFGLPITGMLNSRVIEIMQKPRCGVPDVAEYSLFPNSPKWTSKVVTYRIVSYTRDLPHITVDRLVSKALNMWGKEIPLHFRKVVWGTADIMIGFARGAHGDSYPFDGPGNTLAHAFAPGTGLGGDAHFDEDERWTDGSSLGINFLYAATHELGHSLGMGHSSDPNAVMYPTYGNGDPQNFKLSQDDIKGIQKLYGKRSNSRKK

SEQ ID NO: 95 - DNA, 2574 bp, Homo sapiens
ttggatgttccgggaaagtgatgtgggtaggacaggcggggcgagccgcaggtgccagaacacagattgtataaaaggctgggggctggtggggagcaggggaagggaatgtgaccaggtctaggtctggagtttcagcttggacactgagccaagcagacaagcaaagcaagccaggacacaccatcctgccccaggcccagcttctctcctgccttccaacgccatggggagcaatctcagcccccaactctgcctgatgccctttatcttgggcctcttgtctggaggtgtgaccaccactccatggtctttggcccggccccagggatcctgctctctggagggggtagagatcaaaggcggctccttccgacttctccaagagggccaggcactggagtacgtgtgtccttctggcttctacccgtaccctgtgcagacacgtacctgcagatctacggggtcctggagcaccctgaagactcaagaccaaaagactgtcaggaaggcagagtgcagagcaatccactgtccaagaccacacgacttcgagaacggggaatactggccccggtctccctactacaatgtgagtgatgagatctctttccactgctatgacggttacactctccggggctctgccaatcgcacctgccaagtgaatggccgatggagtgggcagacagcgatctgtgacaacggagcggggtactgctccaacccgggcatccccattggcacaaggaaggtgggcagccagtaccgccttgaagacagcgtcacctaccactgcagccgggggcttaccctgcgtggctcccagcggcgaacgtgtcaggaaggtggctcttggagcgggacggagccttcctgccaagactccttcatgtacgacacccctcaagaggtggccgaagctttcctgtcttccctgacagagaccatagaaggagtcgatgctgaggatgggcacggcccaggggaacaacagaagcggaagatcgtcctggacccttcaggctccatgaacatctacctggtgctagatggatcagacagcattggggccagcaacttcacaggagccaaaaagtgtctagtcaacttaattgagaaggtggcaagttatggtgtgaagccaagatatggtctagtgacatatgccacataccccaaaatttgggtcaaagtgtctgaagcagacagcagtaatgcagactgggtcacgaagcagctcaatgaaatcaattatgaagaccacaagttgaagtcagggactaacaccaagaaggccctccaggcagtgtacagcatgatgagctggccagatgacgtccctcctgaaggctggaaccgcacccgccatgtcatcatcctcatgactgatggattgcacaacatgggcggggacccaattactgtcattgatgagatccgggacttgctatacattggcaaggatcgcaaaaacccaagggaggattatctggatgtctatgtgtttggggtcgggcctttggtgaaccaagtgaacatcaatgctttggcttccaagaaagacaatgagcaacatgtgttcaaagtcaaggatatggaaaacctggaagatgttttctaccaaatgatcgatgaaagccagtctctgagtctctgtggcatggtttgggaacacaggaagggtaccgattaccacaagcaaccatggcaggccaagatctcagtcattcgcccttcaaagggacacgagagctgtatgggggctgtggtgtctgagtactttgtgctgacagcagcacattgtttcactgtggatgacaaggaacactcaatcaaggtcagcgtaggaggggagaagcgggacctggagatagaagtagtcctatttcaccccaactacaacattaatgggaaaaaagaagcaggaattcctgaattttatgactatgacgttgccctgatcaagctcaagaataagctgaaatatggccagactatcaggcccatttgtctcccctgcaccgagggaacaactcgagctttgaggcttcctccaactaccacttgccagcaacaaaaggaagagctgctccctgcacaggatatcaaagctctgtttgtgtctgaggaggagaaaaagctgactcggaaggaggtctacatcaagaatggggataagaaaggcagctgtgagagagatgctcaatatgccccaggctatgacaaagtcaaggacatctcagaggtggtcacccctcggttcctttgtactggaggagtgagtccctatgctgaccccaatacttgcagaggtgattctggcggccccttgatagttcacaagagaagtcgtttcattcaagttggtgtaatcagctggggagtagtggatgtctgcaaaaaccagaagcggcaaaagcaggtacctgctcacgcccgagactttcacatcaacctctttcaagtgctgccctggctgaaggagaaactccaagatgaggatttgggttttctataaggggtttcctgctggacaggggcgtgggattgaattaaaacagctgcgacaac

SEQ ID NO: 96 - protein, 764 aa, Homo sapiens
MGSNLSPQLCLMPFILGLLSGGVTTTPWSLARPQGSCSLEGVEIKGGSFRLLQEGQALEYVCPSGFYPYPVQTRTCRSTGSWSTLKTQDQKTVRKAECRAIHCPRPHDFENGEYWPRSPYYNVSDEISFHCYDGYTLRGSANRTCQVNGRWSGQTAICDNGAGYCSNPGIPIGTRKVGSQYRLEDSVTYHCSRGLTLRGSQRRTCQEGGSWSGTEPSCQDSFMYDTPQEVAEAFLSSLTETIEGVDAEDGHGPGEQQKRKIVLDPSGSMNIYLVLDGSDSIGASNFTGAKKCLVNLIEKVASYGVKPRYGLVTYATYPKIWVKVSEADSSNADWVTKQLNEINYEDHKLKSGTNTKKALQAVYSMMSWPDDVPPEGWNRTRHVIILMTDGLHNMGGDPITVIDEIRDLLYIGKDRKNPREDYLDVYVFGVGPLVNQVNINALASKKDNEQHVFKVKDMENLEDVFYQMIDESQSLSLCGMVWEHRKGTDYHKQPWQAKISVIRPSKGHESCMGAVVSEYFVLTAAHCFTVDDKEHSIKVSVGGEKRDLEIEVVLFHPNYNINGKKEAGIPEFYDYDVALIKLKNKLKYGQTIRPICLPCTEGTTRALRLPPTTTCQQQKEELLPAQDIKALFVSEEEKKLTRKEVYIKNGDKKGSCERDAQYAPGYDKVKDISEVVTPRFLCTGGVSPYADPNTCRGDSGGPLIVHKRSRFIQVGVISWGVVDVCKNQKRQKQVPAHARDFHINLFQVLPWLKEKLQDEDLGFL

SEQ ID NO: 97 - DNA, 510 bp, Homo sapiens
tgaggctgccttataaagcaccaagaggctgccagtgggacattttctcggccctgccagcccccaggaggaaggtgggtctgaatctagcaccatgacggaactagagacagccatgggcatgatcatagacgtcttttcccgatattcgggcagcgagggcagcacgcagaccctgaccaagggggagctcaaggtgctgatggagaaggagctaccaggcttcctgcagagtggaaaagacaaggatgccgtggataaattgctcaaggacctggacgccaatggagatgcccaggtggacttcagtgagttcatcgtgttcgtggctgcaatcacgtctgcctgtcacaagtactttgagaaggcaggactcaaatgatgccctggagatgtcacagattcctggcagagccatggtcccaggcttcccaaaagtgtttgttggcaattattcccctaggctgagcctgctcatgtacctctgattaataaatgcttatgaaatga

SEQ ID NO: 98 - protein, 95 aa, Homo sapiens
MTELETAMGMIIDVFSRYSGSEGSTQTLTKGELKVLMEKELPGFLQSGKDKDAVDKLLKDLDANGDAQVDFSEFIVFVAAITSACHKYFEKAGLK

SEQ ID NO: 99 - DNA, 1103 bp, Homo sapiens; identical to SEQ ID NO: 21

SEQ ID NO: 100 - protein, 107 aa, Homo sapiens; identical to SEQ ID NO: 22

SEQ ID NO: 101 - DNA, 1572 bp, Homo sapiens
aatttctcactgcccctgtgataaactgtggtcactggctgtggcagcaactattataagatgctctgaaaactcttcagacactgaggggcaccagaggagcagactacaagaatggcacacgctatggaaaactcctggacaatcagtaaagagtaccatattgatgaagaagtgggctttgctctgccaaatccacaggaaaatctacctgatttttataatgactggatgttcattgctaaacatctgcctgatctcatagagtctggccagcttcgagaaagagttgagaagttaaacatgctcagcattgatcatctcacagaccacaagtcacagcgccttgcacgtctagttctgggatgcatcaccatggcatatgtgtggggcaaaggtcatggagatgtccgtaaggtcttgccaagaaatattgctgttccttactgccaactctccaagaaactggaactgcctcctattttggtttatgcagactgtgtcttggcaaactggaagaaaaaggatcctaataagcccctgacttatgagaacatggacgttttgttctcatttcgtgatggagactgcagtaaaggattcttcctggtctctctattggtggaaatagcagctgcttctgcaatcaaagtaattcctactgtattcaaggcaatgcaaatgcaagaacgggacactttgctaaaggcgctgttggaaatagcttcttgcttggagaaagcccttcaagtgtttcaccaaatccacgatcatgtgaacccaaaagcatttttcagtgttcttcgcatatatttgtctggctggaaaggcaacccccagctatcagacggtctggtgtatgaagggttctgggaagacccaaaggagtttgcagggggcagtgcaggccaaagcagcgtctttcagtgctttgacgtcctgctgggcatccagcagactgctggtggaggacatgctgctcagttcctccaggacatgagaagatatatgccaccagctcacaggaacttcctgtgctcattagagtcaaatccctcagtccgtgagtttgtcctttcaaaaggtgatgctggcctgcgggaagcttatgacgcctgtgtgaaagctctggtctccctgaggagctaccatctgcaaatcgtgactaagtacatcctgattcctgcaagccagcagccaaaggagaataagacctctgaagacccttcaaaactggaagccaaaggaactggaggcactgatttaatgaatttcctgaagactgtaagaagtacaactgagaaatcccttttgaaggaaggttaatgtaacccaacaagagcacattttatcatagcagagacatctgtatgcattcctgtcattacccattgtaacagagccacaaactaatactatgcaatgttttaccaataatgcaatacaaaagacctcaaaatacctgtgcatttcttgtaggaaaacaacaaaaggtaattatgtgtaattatactagaagttttgtaatctgtatcttatcattggaataaaatgacattcaataaataaaaa

SEQ ID NO: 102 - protein, 403 aa, Homo sapiens [sequence omitted]

SEQ ID NO: 103 - DNA, 3015 bp, Homo sapiens
cagggtttattgttatgtaagttcttgttcagcttcctttgttttctttcacttctgagaatttaactttcgtttctcactcagctcctgtggggaaactcatttgtggagaccagccctctggcttggtgagtgaatctggtttacaccggctcctgccctgccttcactcttctcccctgattcaagactcctctgctttggactgaagcactgcaggagtttgtgaccaagaacttcaagagtcaagacagaaggaagccaagggagcagtgcaatggatttctcagtaaaggtagacatagagaaggaggtgacctgccccatctgcctggagctcctgacagaacctctgagcctagattgtggccacagcttctgccaagcctgcatcactgcaaagatcaaggagtcagtgatcatctcaagaggggaaagcagctgtcctgtgtgtcagaccagattccagcctgggaacctccgacctaatcggcatctggccaacatagttgagagagtcaaagaggtcaagatgagcccacaggaggggcagaagagagatgtctgtgagcaccatggaaaaaaactccagatcttctgtaaggaggatggaaaagtcatttgctgggtttgtgaactgtctcaggaacaccaaggtcaccaaacattccgcataaacgaggtggtcaaggaatgtcaggaaaagctgcaggtagccctgcagaggctgataaaggaggatcaagaggctgagaagctggaagatgacatcagacaagagagaaccgcctggaagaattatatccagatcgagagacagaagattctgaaagggttcaatgaaatgagagtcatcttggacaatgaggagcagagagagctgcaaaagctggaggaaggtgaggtgaatgtgctggataacctggcagcagctacagaccagctggtccagcagaggcaggatgccagcacgctcatctcagatctccagcggaggttgaggggatcgtcagtagagatgctgcaggatgtgattgacgtcatgaaaaggagtgaaagctggacattgaagaagccaaaatctgtttccaagaaactaaagagtgtattccgagtaccagatctgagtgggatgctgcaagttcttaaagagctgacagatgtccagtactactgggtggacgtgatgctgaatccaggcagtgccacttcgaatgttgctatttctgtggatcagagacaagtgaaaactgtacgcacctgcacatttaagaattcaaatccatgtgatttttctgcttttggtgtcttcggctgccaatatttctcttcggggaaatattactgggaagtagatgtgtctggaaagattgcctggatcctgggcgtacacagtaaaataagtagtctgaataaaaggaagagctctgggtttgcttttgatccaagtgtaaattattcaaaagtttactccagatatagacctcaatatggctactgggttataggattacagaatacatgtgaatataatgcttttgaggactcctcctcttctgatcccaaggttttgactctctttatggctgtgcctccctgtcgtattggggttttcctagactatgaggcaggcattgtctcatttttcaatgtcacaaaccacggagcactcatctacaagttctctggatgtcgcttttctcgacctgcttatccgtatttcaatccttggaactgcctagtccccatgactgtgtgcccaccgagctcctgagtgttctcattcctttacccacttctgcatagtagcccttgtgctgagactcagattctgcacctgagttcatctctactgagaccatctcttcctttctttccccttcttttacttagaatgtctttgtattcatttgctagggcttccatagcaaagcatcatagattgctgatttaaactgtaattgtattgccgtactgtgggctggaaatcccaaatctagattccagcagagttggttctttctgaggtctgcaaggaagggctctgttccatgcctctctccttggcttgtagaaggcatcttgtccctatgactcttcacattgtctttatgtacatctctgtgcccaagttttccctttttattaagacaccagtcatactggctcagggcccaccgctaatgccttaatgaaatcattttaacattatattctctacaaagaccttatttccaaataagataatatttggaggtattgggaataaaaactccaacatataaatttgaggaaggcacgatttcactcataacaatcttaccctttcttgcaagagatgcttgtacattattttcctaataccttggtttcactagtagtaaacattattattttttttatatttgcaaaggaaacatatctaatccttcctatagaaagaacagtattgctgtaattccttttcttttcttcctcatttcctctgccccttaaaagattgaagaaagagaaacttgtcaactcatatccacgttatctagcaaagtacataagaatctatcactaagtaatgtatccttcagaatgtgttggtttaccagtgacaccccatattcatcacaaaattaaagcaagaagtccatagtaatttatttgctaatagtggatttttaatgctcagagtttctgaggtcaaattttatcttttcacttacaagctctatgatcttaaataatttacttaatgtattttggtgtattttcctcaaattaatattggtgttcaagactatatctaattcctctgatcactttgagaaacaaacttttattaaatgtaaggcacttttctatgaattttaaatataaaaataaatattgttctgattattactgaaaagatgtcagccatttcaatgtcttgggaaacaattttttgtttttgttctgttttctttttgcttcaataaaacaatagctggctctaaaaaaaaaaaaaaaaaaaaaaaaaaa

SEQ ID NO: 104 - protein, 498 aa, Homo sapiens
MDFSVKVDIEKEVTCPICLELLTEPLSLDCGHSFCQACITAKIKESVIISRGESSCPVCQTRFQPGNLRPNRHLANIVERVKEVKMSPQEGQKRDVCEHHGKKLQIFCKEDGKVICWVCELSQEHQGHQTFRINEVVKECQEKLQVALQRLIKEDQEAEKLEDDIRQERTAWKNYIQIERQKILKGFNEMRVILDNEEQRELQKLEEGEVNVLDNLAAATDQLVQQRQDASTLISDLQRRLRGSSVEMLQDVIDVMKRSESWTLKKPKSVSKKLKSVFRVPDLSGMLQVLKELTDVQYYWVDVMLNPGSATSNVAISVDQRQVKTVRTCTFKNSNPCDFSAFGVFGCQYFSSGKYYWEVDVSGKIAWILGVHSKISSLNKRKSSGFAFDPSVNYSKVYSRYRPQYGYWVIGLQNTCEYNAFEDSSSSDPKVLTLFMAVPPCRIGVFLDYEAGIVSFFNVTNHGALIYKFSGCRFSRPAYPYFNPWNCLVPMTVCPPSS

SEQ ID NO: 105 - DNA, 716 bp, Homo sapiens; identical to SEQ ID NO: 71

SEQ ID NO: 106 - protein, 122 aa, Homo sapiens; identical to SEQ ID NO: 72

SEQ ID NO: 107 - DNA, 1449 bp, Homo sapiens
tcacctgccccacagccgcaccctgcctgtgcctgcaccctggggagcccagagccggcaggggccgaggcggtgggacctcgggggagctcaagcctcgactgtcccctcgctggaggccagaggccaagatgatgtccatgctgggcggcttgcagagatacttccgggtcatcctcctcctcctcctggccctgactctgctcctgctggccggattcctgcactcggacttagagctggacacacccctgtttgggggccaggctgaggggccgccggtcaccaacatcatgttcctgaagacgcacaagacggccagcagcacggtgctcaacatcctctaccgcttcgccgagacccacaacctgtccgtggcgctgcccgccggctcacgcgtccacctgggctacccctggctcttcctggcgcgctacgtggaaggcgtggggtcgcagcagcgcttcaacatcatgtgcaaccacctgaggttcaacctgcctcaggtgcagaaagtcatgcccaacgacaccttctacttctccatcctgaggaaccccgtgttccagctggagtcctccttcatctactacaaaacctacgcccccgccttccggggcgccccgagcctggacgcgttcctggcctcgccgcggacgttctacaacgacagccgccacctcaggaacgtctacgccaagaacaacatgtggttcgacttcggcttcgaccccaacgcgcagtgcgaggagggctacgtgcgcgcgcgcatcgccgaggtggagcggcgcttccggctggtgctcatcgccgagcacctggacgagtccctggtgctgctgcggcgccggctgcgctgggcgctggacgacgtggtggccttcaggctcaactcccgcagcgcgcgctccgtggcccgcctgtcgcccgagacccgggagcgcgcgcggagctggtgcgcgctggactggcgcctgtacgagcatttcaaccgcaccctctgggcgcagctgcgcgccgagctggggccgcggcggctgcgcggggaggtggagcggctgcgcgcccggaggcgcgaactcgcgagcctgtgcctgcaggacggcggcgcgctcaagaaccacacgcagatcagagacccgcgcctgcgcccctaccagtccggcaaggccgacatcctgggttacaacctccggccgggcctggacaaccagacgctgggcgtgtgccagaggcttgtgatgcctgagctccagtacatggcccgcctgtacgccctgcagttcccggagaagcccctcaagaacatcccgttcctgggggcgtagaggggccgggccggggacgaggcctcctgcggacaccagctcctctctccgccgtcaccggggaggccggggatccttgcagggcttctggggcgttgggaaacccaggcccgccggccac

SEQ ID NO: 108 - protein, 398 aa, Homo sapiens
MMSMLGGLQRYFRVILLLLLALTLLLLAGFLHSDLELDTPLFGGQAEGPPVTNIMFLKTHKTASSTVLNILYRFAETHNLSVALPAGSRVHLGYPWLFLARYVEGVGSQQRFNIMCNHLRFNLPQVQKVMPNDTFYFSILRNPVFQLESSFIYYKTYAPAFRGAPSLDAFLASPRTFYNDSRHLRNVYAKNNMWFDFGFDPNAQCEEGYVRARIAEVERRFRLVLIAEHLDESLVLLRRRLRWALDDVVAFRLNSRSARSVARLSPETRERARSWCALDWRLYEHFNRTLWAQLRAELGPRRLRGEVERLRARRRELASLCLQDGGALKNHTQIRDPRLRPYQSGKADILGYNLRPGLDNQTLGVCQRLVMPELQYMARLYALQFPEKPLKNIPFLGA

SEQ ID NO: 109 - DNA, 5392 bp, Homo sapiens
aattcactaatgcattctgctctttttgagagcacagcttctcagatgtgctccttggagctggtgtgcagtgtcctgactgtaagatcaagtccaaacctgttttggaattgaggaaacttctcttttgatctcagcccttggtggtccaggtcttcatgctgctgtgggtgatattactggtcctggctcctgtcagtggacagtttgcaaggacacccaggcccattattttcctccagcctccatggaccacagtcttccaaggagagagagtgaccctcacttgcaagggatttcgcttctactcaccacagaaaacaaaatggtaccatcggtacctcgggaaagaaatactaagagaaaccccagacaatatccttgaggttcaggaatctggagagtacagatgccaggcccagggctcccctctcagtagccctgtgcacttggatttttcttcagcttcgctgatcctgcaagctccactttctgtgtttgaaggagactctgtggttctgaggtgccgggcaaaggcggaagtaacactgaataatactatttacaagaatgataatgtcctggcattccttaataaaagaactgacttccatattcctcatgcatgtctcaaggacaatggtgcatatcgctgtactggatataaggaaagttgttgccctgtttcttccaatacagtcaaaatccaagtccaagagccatttacacgtccagtgctgagagccagctccttccagcccatcagcgggaacccagtgaccctgacctgtgagacccagctctctctagagaggtcagatgtcccgctccggttccgcttcttcagagatgaccagaccctgggattaggctggagtctctccccgaatttccagattactgccatgtggagtaaagattcagggttctactggtgtaaggcagcaacaatgcctcacagcgtcatatctgacagcccgagatcctggatacaggtgcagatccctgcatctcatcctgtcctcactctcagccctgaaaaggctctgaattttgagggaaccaaggtgacacttcactgtgaaacccaggaagattctctgcgcactttgtacaggttttatcatgagggtgtccccctgaggcacaagtcagtccgctgtgaaaggggagcatccatcagcttctcactgactacagagaattcagggaactactactgcacagctgacaatggccttggcgccaagcccagtaaggctgtgagcctctcagtcactgttcccgtgtctcatcctgtcctcaacctcagctctcctgaggacctgatttttgagggagccaaggtgacacttcactgtgaagcccagagaggttcactccccatcctgtaccagtttcatcatgaggatgctgccctggagcgtaggtcggccaactctgcaggaggagtggccatcagcttctctctgactgcagagcattcagggaactactactgcacagctgacaatggctttggcccccagcgcagtaaggcggtgagcctctccatcactgtccctgtgtctcatcctgtcctcaccctcagctctgctgaggccctgacttttgaaggagccactgtgacacttcactgtgaagtccagagaggttccccacaaatcctataccagttttatcatgaggacatgcccctgtggagcagctcaacaccctctgtgggaagagtgtccttcagcttctctctgactgaaggacattcagggaattactactgcacagctgacaatggctttggtccccagcgcagtgaagtggtgagcctttttgtcactgttccagtgtctcgccccatcctcaccctcagggttcccagggcccaggctgtggtgggggacctgctggagcttcactgtgaggccccgagaggctctcccccaatcctgtactggttttatcatgaggatgtcaccctggggagcagctcagccccctctggaggagaagcttctttcaacctctctctgactgcagaacattctggaaactactcatgtgaggccaacaatggcctagtggcccagcacagtgacacaatatcactcagtgttatagttccagtatctcgtcccatcctcaccttcagggctcccagggcccaggctgtggtgggggacctgctggagcttcactgtgaggccctgagaggctcctccccaatcctgtactggttttatcatgaagatgtcaccctgggtaagatctcagccccctctggaggaggggcctccttcaacctctctctgactacagaacattctggaatctactcctgtgaggcagacaatggtccggaggcccagcgcagtgagatggtgacactgaaagttgcagttccggtgtctcgcccggtcctcaccctcagggctcccgggacccatgctgcggtgggggacctgctggagcttcactgtgaggccctgagaggctctcccctgatcctgtaccggttttttcatgaggatgtcaccctaggaaataggtcgtccccctctggaggagcgtccttaaacctctctctgactgcagagcactctggaaactactcctgtgaggccgacaatggcctcggggcccagcgcagtgagacagtgacactttatatcacagggctgaccgcgaacagaagtggcccttttgccacaggagtcgccgggggcctgctcagcatagcaggccttgctgcgggggcactgctgctctactgctggctctcgagaaaagcagggagaaagcctgcctctgaccccgccaggagccctccagactcggactcccaagagcccacctatcacaatgtaccagcctgggaagagctgcaaccagtgtacactaatgcaaatcctagaggagaaaatgtggtttactcagaagtacggatcatccaagagaaaaagaaacatgcagtggcctctgaccccaggcatctcaggaacaagggttcccctatcatctactctgaagttaaggtggcgtcaaccccggtttccggatccctgttcttggcttcctcagctcctcacagatgagtccacacgtctctccaactgctgtttcagcctctgcaccccaaagttccccttgggggagaagcagcattgaagtgggaagatttaggctgccccagaccatatctactggcctttgtttcacatgtcctcattctcagtctgaccagaatgcagggccctgctggactgtcacctgtttcccagttaaagccctgactggcaggttttttaatccagtggcaaggtgctcccactccagggcccagcacatctcctggattccttagtgggcttcagctgtgattgctgttctgagtactgctctcatcacacccccacagagggggtcttaccacacaaagggagagtgggccttcaggagatgccgggctggcctaacagctcaggtgctcctaaactccgacacagagttcctgctttgggtggatgcatttctcaattgtcatcagcctggtggggctactgcagtgtgctgccaaatgggacagcacacagcctgtgcacatgggacatgtgatgggtctccccacgggggctgcatttcacactcctccacctgtctcaaactctaaggtcggcacttgacaccaaggtaacttctctcctgctcatgtgtcagtgtctacctgcccaagtaagtggctttcatacaccaagtcccaagttcttcccatcctaacagaagtaacccagcaagtcaaggccaggaggaccaggggtgcagacagaacacatactggaacacaggaggtgctcaattactatttgactgactgactgaatgaatgaatgaatgaggaagaaaactgtgggtaatcaaactggcataaaatccagtgcactccctaggaaatccgggaggtattctggcttccctaagaaacaacggaagagaaggagcttggatgaggaaactgttcagcaagaggaagggcttctcacactttcatgtgcttgtggatcacctgaggatcctgtgaaaatacagatactgattcagtgggtctgtgtagagcctgagactgccattctaacatgttcccaggggatgctgatgctgctggccctgggactgcactgcatgcatgtgaagccctataggtctcagcagaggcccatggagagggaatgtgtggctctggctgcccagggcccaactcggttcacacggatcgtgctgctccctggccagcctttggccacagcaccaccagctgctgttgctgagagagcttcttctctgtgacatgttggctttcatcagccaccctgggaagcggaaagtagctgccactatctttgtttccccacctcaggcctcacactttcccatgaaaagggtgaatgtatataacctgagccctctccattcagagttgttctcccatctctgagcaatgggatgttctgttccgcttttatgatatccatcacatcttatcttgatctttgctcccagtggattgtacagtgatgacttttaagccccacggccctgaaataaaatccttccaagggcattggaagctctctccacctgaaccatggcttttcatgcttccaagtgtcagggccttgcccagatagacagggctgactctgctgccccaacctttcaaggaggaaaccagacacctgagacaggagcctgtatgcagcccagtgcagccttgcagaggacaaggctggaggcatttgtcatcactacagatatgcaactaaaatagacgtggagcaagagaaatgcattcccaccgaggccgcttttttaggcctagttgaaagtcaagaaggacagcagcaagcataggctcaggattaaagaaaaaaatctgctcacagtttgttctggaggtcacatcaccaacaaagctcacgccctatgcagttctgagaaggtggaggcaccaggctcaaaagaggaaatttagaatttctcattgggagagtaaggtacccccatcccagaatgataactgcacagtggcagaacaaactccaccctaatgtgggtggaccccatccagtctgttgaaggcctgagtgtaacaaaagggcttattcttcctcaagtaagggggaactcctgctttgggctgggacataagtttttctgctttcagacgcaaactgaaaaatggctcttcttgggtcttgagcttgctggcatatggactgaaagaaactatgctattggatctcctggatctccagcttgctgactgcagatcttgagatatgtcagcctctacagtcacaagagctaattcattctaataaaccaatctttctgtaaa

SEQ ID NO: 110 - protein, 977 aa, Homo sapiens
MLLWVILLVLAPVSGQFARTPRPIIFLQPPWTTVFQGERVTLTCKGFRFYSPQKTKWYHRYLGKEILRETPDNILEVQESGEYRCQAQGSPLSSPVHLDFSSASLILQAPLSVFEGDSVVLRCRAKAEVTLNNTIYKNDNVLAFLNKRTDFHIPHACLKDNGAYRCTGYKESCCPVSSNTVKIQVQEPFTRPVLRASSFQPISGNPVTLTCETQLSLERSDVPLRFRFFRDDQTLGLGWSLSPNFQITAMWSKDSGFYWCKAATMPHSVISDSPRSWIQVQIPASHPVLTLSPEKALNFEGTKVTLHCETQEDSLRTLYRFYHEGVPLRHKSVRCERGASISFSLTTENSGNYYCTADNGLGAKPSKAVSLSVTVPVSHPVLNLSSPEDLIFEGAKVTLHCEAQRGSLPILYQFHHEDAALERRSANSAGGVAISFSLTAEHSGNYYCTADNGFGPQRSKAVSLSITVPVSHPVLTLSSAEALTFEGATVTLHCEVQRGSPQILYQFYHEDMPLWSSSTPSVGRVSFSFSLTEGHSGNYYCTADNGFGPQRSEVVSLFVTVPVSRPILTLRVPRAQAVVGDLLELHCEAPRGSPPILYWFYHEDVTLGSSSAPSGGEASFNLSLTAEHSGNYSCEANNGLVAQHSDTISLSVIVPVSRPILTFRAPRAQAVVGDLLELHCEALRGSSPILYWFYHEDVTLGKISAPSGGGASFNLSLTTEHSGIYSCEADNGPEAQRSEMVTLKVAVPVSRPVLTLRAPGTHAAVGDLLELHCEALRGSPLILYRFFHEDVTLGNRSSPSGGASLNLSLTAEHSGNYSCEADNGLGAQRSETVTLYITGLTANRSGPFATGVAGGLLSIAGLAAGALLLYCWLSRKAGRKPASDPARSPPDSDSQEPTYHNVPAWEELQPVYTNANPRGENVVYSEVRIIQEKKKHAVASDPRHLRNKGSPIIYSEVKVASTPVSGSLFLASSAPHR

SEQ ID NO: 111 - DNA, 3143 bp, Homo sapiens; identical to SEQ ID NO: 67

SEQ ID NO: 112 - protein, 544 aa, Homo sapiens; identical to SEQ ID NO: 68

SEQ ID NO: 113 - DNA, 2213 bp, Homo sapiens; identical to SEQ ID NO: 41

SEQ ID NO: 114 - protein, 627 aa, Homo sapiens [sequence omitted]

SEQ ID NO: 115 - DNA, 2387 bp, Homo sapiens; identical to SEQ ID NO: 91

SEQ ID NO: 116 - protein, 707 aa, Homo sapiens; identical to SEQ ID NO: 92

SEQ ID NO: 117 - DNA, 1103 bp, Homo sapiens; identical to SEQ ID NO: 21

SEQ ID NO: 118 - protein, 107 aa, Homo sapiens; identical to SEQ ID NO: 22

SEQ ID NO: 119 - DNA, 1123 bp, Homo sapiens
ctatagaagagctatgacgtcgcatgcacgcgtacgtaagctcggaattcggctcgaggcttctcgcacagcttcccgacgcgtctgctgagccccatggcccacgccacgctctccgccgcccccagcaatccccggctcctgcgggtggcgctgctgctcctgctcctggtggccgccagccggcgcgcagcaggagcgtccgtggtcactgaactgcgctgccagtgcttgcagacactgcagggaattcacctcaagaacatccaaagtgtgaatgttaggtcccccggaccccactgcgcccaaaccgaagtcatagccacactcaagaatgggaagaaagcttgtctcaaccccgcatcccccatggttcagaaaatcatcgaaaagatactgaacaaggggagcaccaactgacaggagagaagtaagaagcttatcagcgtatcattgacacttcctgcagggtggtccctgcccttaccagagctgaaaatgaaaaagagaacagcagctttctagggacagctggaaaggacttaatgtgtttgactatttcttacgagggttctacttatttatgtatttatttttgaaagcttgtattttaatattttacatgctgttatttaaagatgtgagtgtgtttcatcaaacatagctcagtcctgattatttaattggaatatgatgggttttaaatgtgtcattaaactaatatttagtgggagaccataatgtgtcagccaccttgataaatgacagggtggggaactggagggtggggggattgaaatgcaagcaattagtggatcactgttagggtaagggaatgtatgtacacatctattttttatactttttttttaaaaaaaaaatgtcagttgttatttattcaaattatctcacattatgtgttcaacatttttatgctgaagtttcccttagacattttatgtcttgcttgtagggcataatgccttgtttaatgtccattctgcagcgtttctctttcccttggaaaagagaatttatcattactgttacatttgtacaaatgacatgataataaaagttttatgaaaaaaaaaaaaaaaaaaaaaaaaaaaaaaaaaaaagg

SEQ ID NO: 120 - protein, 107 aa, Homo sapiens
MAHATLSAAPSNPRLLRVALLLLLLVAASRRAAGASVVTELRCQCLQTLQGIHLKNIQSVNVRSPGPHCAQTEVIATLKNGKKACLNPASPMVQKIIEKILNKGSTN

SEQ ID NO: 121 - DNA, 1498 bp, Homo sapiens; identical to SEQ ID NO: 19

SEQ ID NO: 122 - protein, 269 aa, Homo sapiens; identical to SEQ ID NO: 20

SEQ ID NO: 123 - DNA, 1726 bp, Homo sapiens; identical to SEQ ID NO: 5

SEQ ID NO: 124 - protein, 378 aa, Homo sapiens; identical to SEQ ID NO: 6

SEQ ID NO: 125 - DNA, 1301 bp, Homo sapiens
gggaggagagaaaagccatggccgacaaggtcctgaaggagaagagaaagctgtttatccgttccatgggtgaaggtacaataaatggcttactggatgaattattacagacaagggtgctgaacaaggaagagatggagaaagtaaaacgtgaaaatgctacagttatggataagacccgagctttgattgactccgttattccgaaaggggcacaggcatgccaaatttgcatcacatacatttgtgaagaagacagttacctggcagggacgctgggactctcagcagctcctcaggcagtgcaggacaacccagctatgcccacatcctcaggctcagaagggaatgtcaagctttgctccctagaagaagctcaaaggatatggaaacaaaagtcggcagagatttatccaataatggacaagtcaagccgcacacgtcttgctctcattatctgcaatgaagaatttgacagtattcctagaagaactggagctgaggttgacatcacaggcatgacaatgctgctacaaaatctggggtacagcgtagatgtgaaaaaaaatctcactgcttcggacatgactacagagctggaggcatttgcacaccgcccagagcacaagacctctgacagcacgttcctggtgttcatgtctcatggtattcgggaaggcatttgtgggaagaaacactctgagcaagtcccagatatactacaactcaatgcaatctttaacatgttgaataccaagaactgcccaagtttgaaggacaaaccgaaggtgatcatcatccaggcctgccgtggtgacagccctggtgtggtgtggtttaaagattcagtaggagtttctggaaacctatctttaccaactacagaagagtttgaggatgatgctattaagaaagcccacatagagaaggattttatcgctttctgctcttccacaccagataatgtttcttggagacatcccacaatgggctctgtttttattggaagactcattgaacatatgcaagaatatgcctgttcctgtgatgtggaggaaattttccgcaaggttcgattttcatttgagcagccagatggtagagcgcagatgcccaccactgaaagagtgactttgacaagatgtttctacctcttcccaggacattaaaataaggaaactgtatgaatgtctgtgggcaggaagtgaagagatccttctgtaaaggtttttggaattatgtctgctgaataataaacttttttgaaataataaatctggtagaaaaatgaaaaaaaaaaa

SEQ ID NO: 126 - protein, 383 aa, Homo sapiens
MADKVLKEKRKLFIRSMGEGTINGLLDELLQTRVLNKEEMEKVKRENATVMDKTRALIDSVIPKGAQACQICITYICEEDSYLAGTLGLSAAPQAVQDNPAMPTSSGSEGNVKLCSLEEAQRIWKQKSAEIYPIMDKSSRTRLALIICNEEFDSIPRRTGAEVDITGMTMLLQNLGYSVDVKKNLTASDMTTELEAFAHRPEHKTSDSTFLVFMSHGIREGICGKKHSEQVPDILQLNAIFNMLNTKNCPSLKDKPKVIIIQACRGDSPGVVWFKDSVGVSGNLSLPTTEEFEDDAIKKAHIEKDFIAFCSSTPDNVSWRHPTMGSVFIGRLIEHMQEYACSCDVEEIFRKVRFSFEQPDGRAQMPTTERVTLTRCFYLFPGH

SEQ ID NO: 127 - DNA, 1406 bp, Homo sapiens
gagggcgccatgaggagcctgtgctgcgccccactcctgctcctcttgctgctgccgccgctgctgctcacgccccgcgctggggacgccgccgtgatcaccggggcttgtgacaaggactcccaatgtggtggaggcatgtgctgtgctgtcagtatctgggtcaagagcataaggatttgcacacctatgggcaaactgggagacagctgccatccactgactcgtaaagttccattttttgggcggaggatgcatcacacttgcccatgtctgccaggcttggcctgtttacggacttcatttaaccgatttatttgtttagcccaaaagtaatcgctctggagtagaaaccaaatgtgaatagccacatcttacctgtaaagtcttacttgtgattgtgccaaacaaaaaatgtgccagaaagaaatgctcttgcttcctcaactttccaagtaacatttttatctttgatttgtaaatgatttttttttttttttttatcgaaagagaattttacttttggatagaaatatgaagtgtaaggcattatggaactggttcttatttccctgtttgtgttttggtttgatttggcttttttcttaaatgtcaaaaacgtacccattttcacaaaaatgaggaaaataagaatttgatattttgttagaaaaacttttttttttttttctcaccaccccaagccccatttgtgccctgccgcacaaatacacctacagcttttggtcccttgcctcttccacctcaaagaatttcaaggctcttaccttactttatttttgtccatttctcttccctcctcttgcattttaaagtggagggtttgtctctttgagtttgatggcagaatcactgatgggaatccagctttttgctggcatttaaatagtgaaaagagtgtatatgtgaacttgacactccaaactcctgtcatggcacggaagctaggagtgctgctggacccttcctaaacctgtcactcaagaggacttcagctctgctgttgggctggtgtgtggacagaaggaatggaaagccaaattaatttagtccagatttctaggtttgggtttttctaaaaataaaagattacatttacttcttttactttttataaagttttttttccttagtctcctacttagagatattctagaaaatgtcacttgaagaggaagtatttattttaatctggcacaacactaattaccatttttaaagcggtattaagttgtaatttaaaccttgtttgtaactgaaaggtcgattgtaatggattgccgtttgtacctgtatcagtattgctgtgtaaaaattctgtatcagaataataacagtactgtatatcatttgatttattttaatattatatccttatttttgtc

SEQ ID NO: 128 - protein, 108 aa, Homo sapiens
MRSLCCAPLLLLLLLPPLLLTPRAGDAAVITGACDKDSQCGGGMCCAVSIWVKSIRICTPMGKLGDSCHPLTRKVPFFGRRMHHTCPCLPGLACLRTSFNRFICLAQK

SEQ ID NO: 129 - DNA, 4206 bp, Homo sapiens
ataatacctaccttgcaggaccacgacaggattaagtgaggaaaaacccccatgagagtgttttgccattgtcaagtgagcctgagggaggctgaggggggatcaggctgtatcatgcccccgaggacaaactttccagtttaccctgctccctctctctgtccctaggctgccccaggccctgtgcagacacaccaggccctcagccgcagcccatggacctgcgggtgggccagcggcccccagtggagcccccaccagagcccacattgctggccctgcagcgtccccagcgcctgcaccaccacctcttcctagcaggcctgcagcagcagcgctcggtggagcccatgaggctctccatggacacgccgatgcccgagttgcaggtgggaccccaggaacaagagctgcggcagcttctccacaaggacaagagcaagcgaagtgctgtagccagcagcgtggtcaagcagaagctagcggaggtgattctgaaaaaacagcaggcggccctagaaagaacagtccatcccaacagccccggcattccctacagaaccctggagcccctggagacggaaggagccacccgctccatgctcagcagctttttgcctcctgttcccagcctgcccagtgaccccccagagcacttccctctgcgcaagacagtctctgagcccaacctgaagctgcgctataagcccaagaagtccctggagcggaggaagaatccactgctccgaaaggagagtgcgccccccagcctccggcggcggcccgcagagaccctcggagactcctccccaagtagtagcagcacgcccgcatcagggtgcagctcccccaatgacagcgagcacggccccaatcccatcctgggctcggaggcgctcttgggccagcggctgcggctgcaggagacttctgtggccccgttcgccttgccgacagtgtccttgctgcccgcaatcactctggggctgcccgcccctgccagggctgacagtgaccgcaggacccatccgactctgggccctcgggggccaatcctggggagcccccacactcccctcttcctgccccatggcttggagcccgaggctgggggcaccttgccctctcgcctgcagcccattctcctcctggacccctcaggctctcatgccccgctgctgactgtgcccgggcttgggcccttgcccttccactttgcccagtccttaatgaccaccgagcggctctctgggtcaggcctccactggccactgagccggactcgctcagagcccctgccccccagtgccaccgctcccccaccgccgggccccatgcagccccgcctggagcagctcaaaactcacgtccaggtgatcaagaggtcagccaagccgagtgagaagccccggctgcggcagataccctcggctgaagacctggagacagatggcgggggaccgggccaggtggtggacgatggcctggagcacagggagctgggccatgggcagcctgaggccagaggccccgctcctctccagcagcaccctcaggtgttgctctgggaacagcagcgactggctgggcggctcccccggggcagcaccggggacactgtgctgcttcctctggcccagggtgggcaccggcctctgtcccgggctcagtcttccccagccgcacctgcctcactgtcagccccagagcctgccagccaggcccgagtcctctccagctcagagacccctgccaggaccctgcccttcaccacagggctgatctatgactcggtcatgctgaagcaccagtgctcctgcggtgacaacagcaggcacccggagcacgccggccgcatccagagcatctggtcccggctgcaggagcgggggctccggagccagtgtgagtgtctccgaggccggaaggcctccctggaagagctgcagtcggtccactctgagcggcacgtgctcctctacggcaccaacccgctcagccgcctcaaactggacaacgggaagctggcagggctcctggcacagcggatgtttgtgatgctgccctgtggtggggttggggtggacactgacaccatctggaatgagcttcattcctccaatgcagcccgctgggccgctggcagtgtcactgacctcgccttcaaagtggcttctcgtgagctaaagaatggtttcgctgtggtgcggcccccaggacaccatgcagatcattcaacagccatgggcttctgcttcttcaactcagtggccatcgcctgccggcagctgcaacagcagagcaaggccagcaagatcctcattgtagactgggacgtgcaccatggcaacggcacccagcaaaccttctaccaagaccccagtgtgctctacatctccctgcatcgccatgacgacggcaacttcttcccggggagtggggctgtggatgaggtaggggctggcagcggtgagggcttcaatgtcaatgtggcctgggctggaggtctggacccccccatgggggatcctgagtacctggctgctttcaggatagtcgtgatgcccatcgcccgagagttctctccagacctagtcctggtgtctgctggatttgatgctgctgagggtcacccggccccactgggtggctaccatgtttctgccaaatgttttggatacatgacgcagcaactgatgaacctggcaggaggcgcagtggtgctggccttggagggtggccatgacctcacagccatctgtgacgcctctgaggcctgtgtggctgctcttctgggtaacagggtggatcccctttcagaagaaggctggaaacagaaacccaacctcaatgccatccgctctctggaggccgtgatccgggtgcacagtaaatactggggctgcatgcagcgcctggcctcctgtccagactcctgggtgcctagagtgccaggggctgacaaagaagaagtggaggcagtgaccgcactggcgtccctctctgtgggcatcctggctgaagataggccctcggagcagctggtggaggaggaagaacctatgaatctctaaggctctggaaccatctgcccgcccaccatgcccttgggacctggttctcttctaacccctggcaatagcccccattcctgggtctttagagatcctgtgggcaagtagttggaaccagagaacagcctgcctgctttgacagttatcccagggagcgtgagaaaatccctgggtctagaatgggaactggagaggaccctgagaggagacgggctgggcggcgacccccacagggctctcgagaacagattctcccctccagtatgggccctggctgtggcccccattcctcaggactgcacagaggaggactggctccggctccgtcgggctcacccttaaccactattcctggctctgcaaaccccagactttgcacacagccccaggctccacacagaaatgtgaacttggcctcagacaggctggcccttcctaggctctaggggctaggggggagtggggagccaagaggtcccatattcctgagtgcaggggtagtccctctcacctgcttcctcagacgactctggaagcttccctctaccaccgggcactgagacgaagctccctgacagccgagactggcagccctccatctggtccgtaccctcgccagaggcccccctacatcaacctcctggcgatgccctggtggagcagatgggtgctctgggagtcctgtgcttcctgatccaatggtgccaaacccttcatctcccccagaagcgcagcatacccctgggacccctcggccactgcccactcggggagccttctctgtttctggggcctcccccaccatagctctgattcccaccccacataggaatagcctgactgagggggaaggggtgggagagaagatacagacatggaggaggggaggctgctctggcaaagtcttcaaggcttttgggggtccaggcctggggtcaagaaggaaaatgtgtgtgagcatgtgtgtgagtgaggcgtgtgtgtgagcgtgtgtgtgagtgaggcgtgtgtgtgtgtctttcctaggacccaccataccctgtgtatgtatgcatgtttttgtaaaaaggaagaaaatggaaaaaaatctgaacaataaatgttttatttgctttaaaaaaaaaaaaaaaaa

SEQ ID NO: 130 - protein, 952 aa, Homo sapiens
MDLRVGQRPPVEPPPEPTLLALQRPQRLHHHLFLAGLQQQRSVEPMRLSMDTPMPELQVGPQEQELRQLLHKDKSKRSAVASSVVKQKLAEVILKKQQAALERTVHPNSPGIPYRTLEPLETEGATRSMLSSFLPPVPSLPSDPPEHFPLRKTVSEPNLKLRYKPKKSLERRKNPLLRKESAPPSLRRRPAETLGDSSPSSSSTPASGCSSPNDSEHGPNPILGSEALLGQRLRLQETSVAPFALPTVSLLPAITLGLPAPARADSDRRTHPTLGPRGPILGSPHTPLFLPHGLEPEAGGTLPSRLQPILLLDPSGSHAPLLTVPGLGPLPFHFAQSLMTTERLSGSGLHWPLSRTRSEPLPPSATAPPPPGPMQPRLEQLKTHVQVIKRSAKPSEKPRLRQIPSAEDLETDGGGPGQVVDDGLEHRELGHGQPEARGPAPLQQHPQVLLWEQQRLAGRLPRGSTGDTVLLPLAQGGHRPLSRAQSSPAAPASLSAPEPASQARVLSSSETPARTLPFTTGLIYDSVMLKHQCSCGDNSRHPEHAGRIQSIWSRLQERGLRSQCECLRGRKASLEELQSVHSERHVLLYGTNPLSRLKLDNGKLAGLLAQRMFVMLPCGGVGVDTDTIWNELHSSNAARWAAGSVTDLAFKVASRELKNGFAVVRPPGHHADHSTAMGFCFFNSVAIACRQLQQQSKASKILIVDWDVHHGNGTQQTFYQDPSVLYISLHRHDDGNFFPGSGAVDEVGAGSGEGFNVNVAWAGGLDPPMGDPEYLAAFRIVVMPIAREFSPDLVLVSAGFDAAEGHPAPLGGYHVSAKCFGYMTQQLMNLAGGAVVLALEGGHDLTAICDASEACVAALLGNRVDPLSEEGWKQKPNLNAIRSLEAVIRVHSKYWGCMQRLASCPDSWVPRVPGADKEEVEAVTALASLSVGILAEDRPSEQLVEEEEPMNL

SEQ ID NO: 131 - DNA, 1970 bp, Homo sapiens
aggaaacggtttattaggagggagtggtggagctgggccaggcaggaagacgctggaataagaaacatttttgctccagcccccatcccagtcccgggaggctgccgcgccagctgcgccgagcgagcccctccccggctccagcccggtccggggccgcgccggaccccagcccgccgtccagcgctggcggtgcaactgcggccgcgcggtggaggggaggtggccccggtccgccgaaggctagcgccccgccacccgcagagcgggcccagagggaccatgaccttgggctcccccaggaaaggccttctgatgctgctgatggccttggtgacccagggagaccctgtgaagccgtctcggggcccgctggtgacctgcacgtgtgagagcccacattgcaaggggcctacctgccggggggcctggtgcacagtagtgctggtgcgggaggaggggaggcacccccaggaacatcggggctgcgggaacttgcacagggagctctgcagggggcgccccaccgagttcgtcaaccactactgctgcgacagccacctctgcaaccacaacgtgtccctggtgctggaggccacccaacctccttcggagcagccgggaacagatggccagctggccctgatcctgggccccgtgctggccttgctggccctggtggccctgggtgtcctgggcctgtggcatgtccgacggaggcaggagaagcagcgtggcctgcacagcgagctgggagagtccagtctcatcctgaaagcatctgagcagggcgacacgatgttgggggacctcctggacagtgactgcaccacagggagtggctcagggctccccttcctggtgcagaggacagtggcacggcaggttgccttggtggagtgtgtgggaaaaggccgctatggcgaagtgtggcggggcttgtggcacggtgagagtgtggccgtcaagatcttctcctcgagggatgaacagtcctggttccgggagactgagatctataacacagtattgctcagacacgacaacatcctaggcttcatcgcctcagacatgacctcccgcaactcgagcacgcagctgtggctcatcacgcactaccacgagcacggctccctctacgactttctgcagagacagacgctggagccccatctggctctgaggctagctgtgtccgcggcatgcggcctggcgcacctgcacgtggagatcttcggtacacagggcaaaccagccattgcccaccgcgacttcaagagccgcaatgtgctggtcaagagcaacctgcagtgttgcatcgccgacctgggcctggctgtgatgcactcacagggcagcgattacctggacatcggcaacaacccgagagtgggcaccaagcggtacatggcacccgaggtgctggacgagcagatccgcacggactgctttgagtcctacaagtggactgacatctgggcctttggcctggtgctgtgggagattgcccgccggaccatcgtgaatggcatcgtggaggactatagaccacccttctatgatgtggtgcccaatgaccccagctttgaggacatgaagaaggtggtgtgtgtggatcagcagacccccaccatccctaaccggctggctgcagacccggtcctctcaggcctagctcagatgatgcgggagtgctggtacccaaacccctctgcccgactcaccgcgctgcggatcaagaagacactacaaaaaattagcaacagtccagagaagcctaaagtgattcaatagcccaggagcacctgattcctttctgcctgcagggggctgggggggtggggggcagtggatggtgccctatctgggtagaggtagtgtgagtgtggtgtgtgctggggatgggcagctgcgcctgcctgctcggcccccagcccacccagccaaaaatacagctgggctgaaacctg

SEQ ID NO: 132 - protein, 503 aa, Homo sapiens
MTLGSPRKGLLMLLMALVTQGDPVKPSRGPLVTCTCESPHCKGPTCRGAWCTVVLVREEGRHPQEHRGCGNLHRELCRGRPTEFVNHYCCDSHLCNHNVSLVLEATQPPSEQPGTDGQLALILGPVLALLALVALGVLGLWHVRRRQEKQRGLHSELGESSLILKASEQGDTMLGDLLDSDCTTGSGSGLPFLVQRTVARQVALVECVGKGRYGEVWRGLWHGESVAVKIFSSRDEQSWFRETEIYNTVLLRHDNILGFIASDMTSRNSSTQLWLITHYHEHGSLYDFLQRQTLEPHLALRLAVSAACGLAHLHVEIFGTQGKPAIAHRDFKSRNVLVKSNLQCCIADLGLAVMHSQGSDYLDIGNNPRVGTKRYMAPEVLDEQIRTDCFESYKWTDIWAFGLVLWEIARRTIVNGIVEDYRPPFYDVVPNDPSFEDMKKVVCVDQQTPTIPNRLAADPVLSGLAQMMRECWYPNPSARLTALRIKKTLQKISNSPEKPKVIQ

SEQ ID NO: 133 - DNA, 2464 bp, Homo sapiens
cggaaacttgggggagtgcacagaagaacttcgggagcgcacgcgggaccagggaccaggctgagactcggggcgccagtccgggcaggggcagcgggacgcggccggagatgccctgtatccaagcccaatatgggacaccagcaccgagtccgggaccccgtgaccacctggcaagcgaccccctgacccctgagttcatcaagcccaccatggacctggccagccccgaggcagcccccgctgcccccactgccctgcccagcttcagcacgttcatggacggctacacaggagagtttgacaccttcctctaccagctgccaggaacagtccagccatgctcctcagcctcctcctcggcctcctccacatcctcgtcctcagccacctcccctgcctctgcctccttcaagttcgaggacttccaggtgtacggctgctaccccggccccctgagcggcccagtggatgaggccctgtcctccagtggctctgactactatggcagcccctgctcggccccgtcgccctccacgcccagcttccagccgccccagctctctccctgggatggctccttcggccacttctcgcccagccagacttacgaaggcctgcgggcatggacagagcagctgcccaaagcctctgggcccccacagcctccagccttcttttccttcagtcctcccactggccccagccccagcctggcccagagccccctgaagttgttcccctcacaggccacccaccagctgggggagggagagagctattccatgcctacggccttcccaggtttggcacccacttctccacaccttgagggctcggggatactggatacacccgtgacctcaaccaaggcccggagcggggccccaggtccaagtgaaggccgctgtgctgtgtgtggggacaacgcttcatgccagcattatggtgtccgcacatgtgagggctgcaagggcttcttcaagcgcacagtgcagaaaaacgccaagtacatctgcctggctaacaaggactgccctgtggacaagaggcggcgaaaccgctgccagttctgccgcttccagaagtgcctggcggtgggcatggtgaaggaagttgtccgaacagacagcctgaaggggcggcggggccggctaccttcaaaacccaagcagcccccagatgcctcccctgccaatctcctcacttccctggtccttgcacacctggattcagggcccagcactgccaaactggactactccaagttccaggagctggtgctgccccactttgggaaggaagatgctggggatgtacagcagttctacgacctgctctccggttctctggaggtcatccgaaagtgggcggagaagatccctggctttgctgagctgtcaccggctgaccaggacctgttgctggagtcggccttcctggagctcttcatcctccgcctggcgtacaggtctaagccaggcgagggcaagctcatcttctgctcaggcctggtgctacaccggctgcagtgtgcccgtggcttcggggactggattgacagtatcctggccttctcaaggtccctgcacagcttgcttgtcgatgtccctgccttcgcctgcctctctgcccttgtcctcatcaccgaccggcatgggctgcaggagccgcggcgggtggaggagctgcagaaccgcatcgccagctgcctgaaggagcacgtggcagctgtggcgggcgagccccagccagccagctgcctgtcacgtctgttgggcaaactgcccgagctgcggaccctgtgcacccagggcctgcagcgcatcttctacctcaagctggaggacttggtgccccctccacccatcattgacaagatcttcatggacacgctgcccttctgacccctgcctgggaacacgtgtgcacatgcgcactctcatatgccaccccatgtgcctttagtccacggacccccagagcacccccaagcctgggcttgagctgcagaatgactccaccttctcacctgctccaggaggtttgcagggagctcaagcccttggggagggggatgccttcatgggggtgaccccacgatttgtcttatcccccccagcctggccccggcctttatgttttttgtaagataaaccgtttttaacacatagcgccgtgctgtaaataagcccagtgctgctgtaaatacaggaagaaagagcttgaggtgggagcggggctgggaggaagggatgggccccgccttcctgggcagcctttccagcctcctgcctggctctctcttcctaccctccttccacatgtacataaactgtcactctaggaagaagacaaatgacagattctgacatttatatttgtgtattttcctggatttatagtatgtgacttttctgattaatatatttaatatattgaataaaaaatagacatgtagttg

SEQ ID NO: 134 - protein, 598 aa, Homo sapiens
MPCIQAQYGTPAPSPGPRDHLASDPLTPEFIKPTMDLASPEAAPAAPTALPSFSTFMDGYTGEFDTFLYQLPGTVQPCSSASSSASSTSSSSATSPASASFKFEDFQVYGCYPGPLSGPVDEALSSSGSDYYGSPCSAPSPSTPSFQPPQLSPWDGSFGHFSPSQTYEGLRAWTEQLPKASGPPQPPAFFSFSPPTGPSPSLAQSPLKLFPSQATHQLGEGESYSMPTAFPGLAPTSPHLEGSGILDTPVTSTKARSGAPGPSEGRCAVCGDNASCQHYGVRTCEGCKGFFKRTVQKNAKYICLANKDCPVDKRRRNRCQFCRFQKCLAVGMVKEVVRTDSLKGRRGRLPSKPKQPPDASPANLLTSLVLAHLDSGPSTAKLDYSKFQELVLPHFGKEDAGDVQQFYDLLSGSLEVIRKWAEKIPGFAELSPADQDLLLESAFLELFILRLAYRSKPGEGKLIFCSGLVLHRLQCARGFGDWIDSILAFSRSLHSLLVDVPAFACLSALVLITDRHGLQEPRRVEELQNRIASCLKEHVAAVAGEPQPASCLSRLLGKLPELRTLCTQGLQRIFYLKLEDLVPPPPIIDKIFMDTLPF

SEQ ID NO: 135 - DNA, 1978 bp, Homo sapiens
agaaactcacacaccttgacaatctgtctgtccgtctgcagctgcgtgactgtctgtctctgccatgtctctctccccatgccgggcccagaggggcttcagcgctcgctcagcctgttctgctcgctcaaggggccgcagcaggggaggcttcagcagcaggggcggcttcagcagcaggagccttaattcctttggggggtgcctggaaggctctcgtgggagtacctgggggtcagggggtaggctgggggtgcggtttggggagtggagtggtgggcctgggctctccctgtgccctccggggggcatccaagaagtgaccatcaaccagaatccgctgaccccactgaagattgagatcgatccccagttccaggtggtgcggacgcaggagacccaggagatcagaaccctcaacaaccagtttgcttccttcattgacaaggtgcggttcctggagcagcagaacaaggtcctggagacgaagtggcatctgctgcagcaacaggggttgagtggcagccagcagggcctggagcctgtctttgaggcctgcctggatcagctcaggaagcagctggagcagctccagggagaacgaggggctctggatgctgagttgaaggcctgccgggaccaggaggaggagtataagtccaagtatgaggaggaggcccacaggcgtgccacacttgagaacgactttgtggtcctcaagaaggatgtggatggggttttcctgagcaagatggagttggagggcaagctggaggctctgagagagtacctctacttcttgaagcatctgaatgaagaagagctgggccagctccaggcccaggccagcgacacgtctgtggtgctgtccatggacaacaaccgctacctggacttcagcagcatcatcactgaggtccgcgcccggtacgaggagatcgcccggagcagcaaggctgaggctgaggccttgtaccagaccaagtaccaggaacttcaggtgtctgcccagcttcatggggacaggatgcaggaaacgaaagtccagatctctcagctacaccaagagattcagaggctgcagagtcagactgagaacctcaagaagcagaacgccagcctgcaggccgccatcactgatgctgagcagcgtggggagctggccctcaaggacgctcaggccaaggtggacgagctggaggctgctctgaggatggccaagcagaacctggcccggctgctgtgcgagtaccaggagctgacgagcacgaagctttccctggatgtggagattgccacttaccgcaggctgctggagggcgaggagtgcaggatgtctggggagtgcaccagccaggtcactatctcctcggtgggaggcagcgctgtcatgtctggaggagttggtggaggcttggggagcacttgtggactcggtagtgggaaaggcagccctgggtcctgctgcaccagcattgtgactggaggctccaacatcattctgggctctgggaaggaccctgttttggattcctgctctgtgtctggctccagcgctggctccagctgccacaccatcctgaagaagacagttgagtcgagtctgaagacatccatcacctactgagcgacccagcagccacctccttcctgaacacatttggcccactccccccatcagccggctctgcaaggccaactccgtgtccgctgcccacagcccaagccagcccacagcggatgctgcaaaaatcaataaagtctcccctcctgctgttctgaatgctctaagtgcttgcacacctcacccagcaaaacaaaagctgtgtggctccccagcttcctctcctcggaaggcaattgtggcatatctgtgtccagacgtgttctattggtatctcactccacatcccagccactctatcaaggaaactaaattcatccaaggtagttcaattaaattgactttttgaaaagt

SEQ ID NO: 136 - protein, 520 aa, Homo sapiens
MSLSPCRAQRGFSARSACSARSRGRSRGGFSSRGGFSSRSLNSFGGCLEGSRGSTWGSGGRLGVRFGEWSGGPGLSLCPPGGIQEVTINQNPLTPLKIEIDPQFQVVRTQETQEIRTLNNQFASFIDKVRFLEQQNKVLETKWHLLQQQGLSGSQQGLEPVFEACLDQLRKQLEQLQGERGALDAELKACRDQEEEYKSKYEEEAHRRATLENDFVVLKKDVDGVFLSKMELEGKLEALREYLYFLKHLNEEELGQLQAQASDTSVVLSMDNNRYLDFSSIITEVRARYEEIARSSKAEAEALYQTKYQELQVSAQLHGDRMQETKVQISQLHQEIQRLQSQTENLKKQNASLQAAITDAEQRGELALKDAQAKVDELEAALRMAKQNLARLLCEYQELTSTKLSLDVEIATYRRLLEGEECRMSGECTSQVTISSVGGSAVMSGGVGGGLGSTCGLGSGKGSPGSCCTSIVTGGSNIILGSGKDPVLDSCSVSGSSAGSSCHTILKKTVESSLKTSITY

SEQ ID NO: 137 - DNA, 2109 bp, Homo sapiens
gagggaagaacacaatggatctggtgctaaaaagatgccttcttcatttggctgtgataggtgctttgctggctgtgggggctacaaaagtacccagaaaccaggactggcttggtgtctcaaggcaactcagaaccaaagcctggaacaggcagctgtatccagagtggacagaagcccagagacttgactgctggagaggtggtcaagtgtccctcaaggtcagtaatgatgggcctacactgattggtgcaaatgcctccttctctattgccttgaacttccctggaagccaaaaggtattgccagatgggcaggttatctgggtcaacaataccatcatcaatgggagccaggtgtggggaggacagccagtgtatccccaggaaactgacgatgcctgcatcttccctgatggtggaccttgcccatctggctcttggtctcagaagagaagctttgtttatgtctggaagacctggggccaatactggcaagttctagggggcccagtgtctgggctgagcattgggacaggcagggcaatgctgggcacacacaccatggaagtgactgtctaccatcgccggggatcccggagctatgtgcctcttgctcattccagctcagccttcaccattactgaccaggtgcctttctccgtgagcgtgtcccagttgcgggccttggatggagggaacaagcacttcctgagaaatcagcctctgacctttgccctccagctccatgaccccagtggctatctggctgaagctgacctctcctacacctgggactttggagacagtagtggaaccctgatctctcgggcacttgtggtcactcatacttacctggagcctggcccagtcactgcccaggtggtcctgcaggctgccattcctctcacctcctgtggctcctccccagttccaggcaccacagatgggcacaggccaactgcagaggcccctaacaccacagctggccaagtgcctactacagaagttgtgggtactacacctggtcaggcgccaactgcagagccctctggaaccacatctgtgcaggtgccaaccactgaagtcataagcactgcacctgtgcagatgccaactgcagagagcacaggtatgacacctgagaaggtgccagtttcagaggtcatgggtaccacactggcagagatgtcaactccagaggctacaggtatgacacctgcagaggtatcaattgtggtgctttctggaaccacagctgcacaggtaacaactacagagtgggtggagaccacagctagagagctacctatccctgagcctgaaggtccagatgccagctcaatcatgtctacggaaagtattacaggttccctgggccccctgctggatggtacagccaccttaaggctggtgaagagacaagtccccctggattgtgttctgtatcgatatggttccttttccgtcaccctggacattgtccagggtattgaaagtgccgagatcctgcaggctgtgccgtccggtgagggggatgcatttgagctgactgtgtcctgccaaggcgggctgcccaaggaagcctgcatggagatctcatcgccagggtgccagccccctgcccagcggctgtgccagcctgtgctacccagcccagcctgccagctggttctgcaccagatactgaagggtggctcggggacatactgcctcaatgtgtctctggctgataccaacagcctggcagtggtcagcacccagcttatcatgcctggtcaagaagcaggccttgggcaggttccgctgatcgtgggcatcttgctggtgttgatggctgtggtccttgcatctctgatatataggcgcagacttatgaagcaagacttctccgtaccccagttgccacatagcagcagtcactggctgcgtctaccccgcatcttctgctcttgtcccattggtgagaacagccccctcctcagtgggcagcaggtctgagtactctcatatgatgctgtgattttcctggagttgacagaaacacctatatttcccccagtcttccctgggagactactattaactgaaataaatactcagagcctga

SEQ ID NO: 138 - protein, 661 aa, Homo sapiens
MDLVLKRCLLHLAVIGALLAVGATKVPRNQDWLGVSRQLRTKAWNRQLYPEWTEAQRLDCWRGGQVSLKVSNDGPTLIGANASFSIALNFPGSQKVLPDGQVIWVNNTIINGSQVWGGQPVYPQETDDACIFPDGGPCPSGSWSQKRSFVYVWKTWGQYWQVLGGPVSGLSIGTGRAMLGTHTMEVTVYHRRGSRSYVPLAHSSSAFTITDQVPFSVSVSQLRALDGGNKHFLRNQPLTFALQLHDPSGYLAEADLSYTWDFGDSSGTLISRALVVTHTYLEPGPVTAQVVLQAAIPLTSCGSSPVPGTTDGHRPTAEAPNTTAGQVPTTEVVGTTPGQAPTAEPSGTTSVQVPTTEVISTAPVQMPTAESTGMTPEKVPVSEVMGTTLAEMSTPEATGMTPAEVSIVVLSGTTAAQVTTTEWVETTARELPIPEPEGPDASSIMSTESITGSLGPLLDGTATLRLVKRQVPLDCVLYRYGSFSVTLDIVQGIESAEILQAVPSGEGDAFELTVSCQGGLPKEACMEISSPGCQPPAQRLCQPVLPSPACQLVLHQILKGGSGTYCLNVSLADTNSLAVVSTQLIMPGQEAGLGQVPLIVGILLVLMAVVLASLIYRRRLMKQDFSVPQLPHSSSHWLRLPRIFCSCPIGENSPLLSGQQV

SEQ ID NO: 139 - DNA, 2288 bp, Homo sapiens
gcctgtcgcaggcgtgcagggacctggactccgcctcgtccccggggctcgggcagccgagccatggcggggaactgtggggcccgcggcgcgctgtcggcgcacacgctgctgttcgacctgccgcccgcgctgctcggagagctctgcgctgttctggacagctgcgacggcgcgctgggctggcgcggcctggcagagagactttcaagcagctggctggatgttcgtcatattgaaaagtatgtagaccaaggtaaaagtggaacaagagaattactttggtcctgggcacagaaaaacaagaccatcggtgaccttttacaggtcctccaggagatgggacatcgtcgagctattcatttaattacaaactatggagcagtgttgagtccttcagagaagagttatcaggaaggtggatttccaaatatattattcaaggaaacagccaatgtcaccgtggataatgttcttattcctgaacataatgaaaaaggagtactgcttaaatcttccatcagctttcaaaatatcatagaaggaactagaaatttccacaaagacttcctaattggagaaggagagatttttgaggtatacagagtggagattcaaaacctaacatatgctgtcaaattatttaaacaggagaaaaaaatgcagtgtaagaagcattggaagaggtttttatctgagcttgaagttttactactgtttcatcacccaaacatactagagttggctgcatattttacagagactgagaagttctgtctgatttatccatacatgagaaatggaacactttttgacagattgcagtgtgtaggtgacacggccccactcccttggcacattcgaatcggtatattaataggaatatccaaagccattcactacctgcacaacgttcaaccatgctcggtcatctgtggcagtatatcaagtgcaaacatccttttggatgatcagtttcaacccaaactaactgattttgccatggcacacttccggtcccacctagaacatcagagttgtaccataaatatgaccagcagcagcagtaaacatctgtggtacatgccagaagagtacatcagacaggggaaactttccattaaaacagatgtctacagctttggaattgtaataatggaagttctaacaggatgtagagtagtgttagatgatccaaaacatatccagctgcgggatctccttagagaattgatggagaagagaggcctggattcatgtctctcatttctagataagaaagtgcctccctgccctcggaatttctctgccaagctcttctgtttggcaggccggtgtgctgcaacgcgggcaaagttaagaccatcaatggatgaagttttaaatactcttgaaagtactcaagccagcttgtattttgctgaagatcctcccacatcactaaagtccttcaggtgtccttctcctctattcctggagaatgtaccaagtattccagtggaagatgatgaaagccagaataacaatttactaccttctgatgaaggcctgaggatagacagaatgactcagaaaactccttttgaatgcagccagtctgaggttatgtttctgagcttggacaaaaagccagagagcaagagaaatgaggaagcttgcaacatgcccagttcttcttgtgaagaaagttggttcccaaagtatatagttccatcccaggacttaaggccctataaggtaaatatagatccttcttcagaagctccagggcattcttgcaggagcaggccagtggagagcagctgttcctccaaattttcctgggatgaatatgaacagtacaaaaaagaataaattctaccagaagataaagaaaaaagcaagtattgcataggcacctgagcataggtatgaccttgggaagacattggctccataagcaatgccaagagaatgatcaatagtgagtttgggtgatgcagataaacaatctggataattccatttcttttttcccaaaccctcaaacagagtgccttaaaaaattgttttatcaggataattgtctcatgaccaaatccacgctcaattagagccattcaaaattccttaagatcatgggttctgacttcagccaaacaaaacaatcaaaacctaccaaaaagggactggattgtaatgtcctctccatcatcctcagtgtgagtcctcagagcctccatctgccaagaacattcagttggattccatcgtttggtttagcttgcttgcacgggttgtaggaaatg

SEQ ID NO: 140 - protein, 596 aa, Homo sapiens
MAGNCGARGALSAHTLLFDLPPALLGELCAVLDSCDGALGWRGLAERLSSSWLDVRHIEKYVDQGKSGTRELLWSWAQKNKTIGDLLQVLQEMGHRRAIHLITNYGAVLSPSEKSYQEGGFPNILFKETANVTVDNVLIPEHNEKGVLLKSSISFQNIIEGTRNFHKDFLIGEGEIFEVYRVEIQNLTYAVKLFKQEKKMQCKKHWKRFLSELEVLLLFHHPNILELAAYFTETEKFCLIYPYMRNGTLFDRLQCVGDTAPLPWHIRIGILIGISKAIHYLHNVQPCSVICGSISSANILLDDQFQPKLTDFAMAHFRSHLEHQSCTINMTSSSSKHLWYMPEEYIRQGKLSIKTDVYSFGIVIMEVLTGCRVVLDDPKHIQLRDLLRELMEKRGLDSCLSFLDKKVPPCPRNFSAKLFCLAGRCAATRAKLRPSMDEVLNTLESTQASLYFAEDPPTSLKSFRCPSPLFLENVPSIPVEDDESQNNNLLPSDEGLRIDRMTQKTPFECSQSEVMFLSLDKKPESKRNEEACNMPSSSCEESWFPKYIVPSQDLRPYKVNIDPSSEAPGHSCRSRPVESSCSSKFSWDEYEQYKKE

SEQ ID NO: 141 - DNA, 601 bp, Homo sapiens
ctgataaactaattgcctcacattgtcactgcaaatcgacacctattaatgggtctcacctcccaactgcttccccctctgttcttcctgctagcatgtgccggcaactttgtccacggacacaagtgcgatatcaccttacaggagatcatcaaaactttgaacagcctcacagagcagaagactctgtgcaccgagttgaccgtaacagacatctttgctgcctccaagaacacaactgagaaggaaaccttctgcagggctgcgactgtgctccggcagttctacagccaccatgagaaggacactcgctgcctgggtgcgactgcacagcagttccacaggcacaagcagctgatccgattcctgaaacggctcgacaggaacctctggggcctggcgggcttgaattcctgtcctgtgaaggaagccaaccagagtacgttggaaaacttcttggaaaggctaaagacgatcatgagagagaaatattcaaagtgttcgagctgaatattttaatttatgagtttttgatagctttattttttaagtatttatatatttataactcatcataaaataaagtatatatagaatctaa

SEQ ID NO: 142 - protein, 153 aa, Homo sapiens [sequence omitted]

SEQ ID NO: 143 - DNA, 1282 bp, Homo sapiens
aagccacccagcctatgcatccgctcctcaatcctctcctgttggcactgggcctcatggcgcttttgttgaccacggtcattgctctcacttgccttggcggctttgcctccccaggccctgtgcctccctctacagccctcagggagctcattgaggagctggtcaacatcacccagaaccagaaggctccgctctgcaatggcagcatggtatggagcatcaacctgacagctggcatgtactgtgcagccctggaatccctgatcaacgtgtcaggctgcagtgccatcgagaagacccagaggatgctgagcggattctgcccgcacaaggtctcagctgggcagttttccagcttgcatgtccgagacaccaaaatcgaggtggcccagtttgtaaaggacctgctcttacatttaaagaaactttttcgcgagggacggttcaactgaaacttcgaaagcatcattatttgcagagacaggacctgactattgaagttgcagattcatttttctttctgatgtcaaaaatgtcttgggtaggcgggaaggagggttagggaggggtaaaattccttagcttagacctcagcctgtgctgcccgtcttcagcctagccgacctcagccttccccttgcccagggctcagcctggtgggcctcctctgtccagggccctgagctcggtggacccagggatgacatgtccctacacccctcccctgccctagagcacactgtagcattacagtgggtgccccccttgccagacatgtggtgggacagggacccacttcacacacaggcaactgaggcagacagcagctcaggcacacttcttcttggtcttatttattattgtgtgttatttaaatgagtgtgtttgtcaccgttggggattggggaagactgtggctgctggcacttggagccaagggttcagagactcagggccccagcactaaagcagtggaccccaggagtccctggtaataagtactgtgtacagaattctgctacctcactggggtcctggggcctcggagcctcatccgaggcagggtcaggagaggggcagaacagccgctcctgtctgccagccagcagccagctctcagccaacgagtaatttattgtttttcctcgtatttaaatattaaatatgttagcaaagagttaatatatagaagggtaccttgaacactgggggaggggacattgaacaagttgtttcattgactatcaaactgaagccagaaataaagttggtgacagat

SEQ ID NO: 144 - protein, 132 aa, Homo sapiens
MALLLTTVIALTCLGGFASPGPVPPSTALRELIEELVNITQNQKAPLCNGSMVWSINLTAGMYCAALESLINVSGCSAIEKTQRMLSGFCPHKVSAGQFSSLHVRDTKIEVAQFVKDLLLHLKKLFREGRFN

SEQ ID NO: 145 - DNA, 4123 bp, Homo sapiens
tgcggagttttggaatagaggacaaagataagcacgcccagaatgctcatcttttcggtccgggacatgtttgcaaagatgagcattctgggcgtgcggagttttggaatagaggacaaagataagcaaattatcactttcttcagcccccttacaattttggttggacccaatggggcgggaaagacgaccatcattgaatgtctaaaatatatttgtactggagatttccctcctggaaccaaaggaaatacatttgtacacgatcccaaggttgctcaagaaacagatgtgagagcccagattcgtctgcaatttcgtgatgtcaatggagaacttatagctgtgcaaagatctatggtgtgtactcagaaaagcaaaaagacagaatttaaaaccctggaaggagtcattactagaacaaagcatggtgaaaaggtcagtctgagctctaagtgtgcagaaattgaccgagaaatgatcagttctcttggggtttccaaggctgtgctaaataatgtcattttctgtcatcaagaagattctaattggcctttaagtgagggaaaggctttgaagcaaaagtttgatgagattttttcagcaacaagatacattaaagccctagaaacacttcggcaggtacgtcagacacaaggtcagaaagtagaagaatatcaaatggaactaaaatatctgaagcaatataaggaaaaagcttgtgagattcgtgatcagattacaagtaaggaagcccagttaacatcttcaaaggaaattgtcaaatcctatgagaatgaacttgatccattgaagaatcgtctaaaagaaattgaacataatctctctaaaataatgaaacttgacaatgaaattaaagccttggatagccgaaagaagcaaatggagaaagataatagtgaactggaagagaaaatggaaaaggtttttcaagggactgatgagcaactaaatgacttatatcacaatcaccagagaacagtaagggagaaagaaaggaaattggtagactgtcatcgtgaactggaaaaactaaataaagaatctaggcttctcaatcaggaaaaatcagaactgcttgttgaacagggtcgtctacagctgcaagcagatcgccatcaagaacatatccgagctagagattcattaattcagtctttggcaacacagctagaattggatggctttgagcgtggaccattcagtgaaagacagattaaaaattttcacaaacttgtgagagagagacaagaaggggaagcaaaaactgccaaccaactgatgaatgactttgcagaaaaagagactctgaaacaaaaacagatagatgagataagagataagaaaactggactgggaagaataattgagttaaaatcagaaatcctaagtaagaagcagaatgagctgaaaaatgtgaagtatgaattacagcagttggaaggatcttcagacaggattcttgaactggaccaggagctcataaaagctgaacgtgagttaagcaaggctgagaaaaacagcaatgtagaaaccttaaaaatggaagtaataagtctccaaaatgaaaaagcagacttagacaggaccctgcgtaaacttgaccaggagatggagcagttaaaccatcatacaacaacacgtacccaaatggagatgctgaccaaagacaaagctgacaaagatgaacaaatcagaaaaataaaatctaggcacagtgatgaattaacctcactgttgggatattttcccaacaaaaaacagcttgaagactggctacatagtaaatcaaaagaaattaatcagaccagggacagacttgccaaattgaacaaggaactagcttcatctgagcagaataaaaatcatataaataatgaactagaaagaaaggaagagcagttgtccagttacgaagacaagctgtttgatgtttgtggtagccaggattttgaaagtgatttagacaggcttaaagaggaaattgaaaaatcatcaaaacagcgagccatgctggctggagccacagcagtttactcccagttcattactcagctaacagacgaaaaccagtcatgttgccccgtttgtcagagagtttttcagacagaggctgagttacaagaagccatcagtgatttgcagtctaaactgcgacttgctccagataaactcaagtcaacagaatcagagctaaaaaaaaaggaaaagcggcgtgatgaaatgctgggacttgcgcccatgaggcaaagcataattgatttgaaggagaaggaaataccagaattaagaaacaaactgcagaatgtcaatagagacatacagcgcctaaagaacgacatagaagaacaagaaacactcttgggtacaataatgcctgaagaagaaagtgccaaagtatgcctgacagatgttacaattatggagaggttccagatggaacttaaagatgttgaaagaaaaattgcacaacaagcagctaagctacaaggaatagacttagatcgaactgtccaacaagtcaaccaggagaaacaagagaaacagcacaagttagacacagtttctagtaagattgaattgaatcgtaagcttatacaggaccagcaggaacagattcaacatctaaaaagtacaacaaatgagctaaaatctgagaaacttcagatatccactaatttgcaacgtcgtcagcaactggaggagcagactgtggaattatccactgaagttcagtctttgtacagagagataaaggatgctaaagagcaggtaagccctttggaaacaacattggaaaagttccagcaagaaaaagaagaattaatcaacaaaaaaaatacaagcaacaaaatagcacaggataaactgaatgatattaaagagaaggttaaaaatattcatggctatatgaaagacattgagaatcatattcaagatgggaaagacgactatatgaagcaaaaagaaactgaacttaataaagtaatagctcaactaagtgaatgcgagaaacacaaagaaaagataaatgaagatatgagactcatgagacaagatattgatacacagaagatacaagaaaggtggctacaagataaccttactttaagaaaaagaaatgaggaactaaaagaagttgaagaagaaggaaaacaacatttgaaggaaatgggtcaaatgcaggttttgcaaatgaaaagtgaacatcagaagttggaagagaacatagacaatataaaaagaaatcataatttggcattagggcgacagaaaggttatgaagaagaaattattcattttaagaaagaacttcgagaaccacaatttcgggatgctgaggaaaagtatagagaaatgatgattgttatgaggacaacagaacttgtgaacaaggatctggatatttattataagactcttgaccaagcaataatgaaatttcacagtatgaagatggaagaaatcaataaaattatacgtgacctgtggcgaagtacctatcgtggacaagatattgaatacatagaaatacggtctgatgccgatgaaaatgtatcagcttctgataaaaggcggaattataactaccgagtggtgatgctgaagggagacacagccttggatatgcgaggacgatgcagtgctggacaaaaggtattagcctcactcatcattcgcctggccctggctgaaacgttctgcctcaactgtggcatcattgccttggatgagccaacaacaaatcttgaccgagaaaacattgaatctcttgcacatgctctggttgagataataaaaagtcgctcacagcagcgtaacttccagcttctggtaatcactcatgatgaagattttgtggagcttttaggacgttctgaatatgtggagaaattctacaggattaaaaagaacatcgatcagtgctcagagattgtgaaatgcagtgttagctccctgggattcaatgttcattaaaaatatccaagatttaaatgccatagaaatgtaggtcctcagaaagtgtataataagaaacttatttctcatatcaacttagtcaataagaaaatatattctttcaaaggaaaaaaaaaaaaaa

SEQ ID NO: 146 - protein, 1318 aa, Homo sapiens
MLIFSVRDMFAKMSILGVRSFGIEDKDKQIITFFSPLTILVGPNGAGKTTIIECLKYICTGDFPPGTKGNTFVHDPKVAQETDVRAQIRLQFRDVNGELIAVQRSMVCTQKSKKTEFKTLEGVITRTKHGEKVSLSSKCAEIDREMISSLGVSKAVLNNVIFCHQEDSNWPLSEGKALKQKFDEIFSATRYIKALETLRQVRQTQGQKVEEYQMELKYLKQYKEKACEIRDQITSKEAQLTSSKEIVKSYENELDPLKNRLKEIEHNLSKIMKLDNEIKALDSRKKQMEKDNSELEEKMEKVFQGTDEQLNDLYHNHQRTVREKERKLVDCHRELEKLNKESRLLNQEKSELLVEQGRLQLQADRHQEHIRARDSLIQSLATQLELDGFERGPFSERQIKNFHKLVRERQEGEAKTANQLMNDFAEKETLKQKQIDEIRDKKTGLGRIIELKSEILSKKQNELKNVKYELQQLEGSSDRILELDQELIKAERELSKAEKNSNVETLKMEVISLQNEKADLDRTLRKLDQEMEQLNHHTTTRTQMEMLTKDKADKDEQIRKIKSRHSDELTSLLGYFPNKKQLEDWLHSKSKEINQTRDRLAKLNKELASSEQNKNHINNELERKEEQLSSYEDKLFDVCGSQDFESDLDRLKEEIEKSSKQRAMLAGATAVYSQFITQLTDENQSCCPVCQRVFQTEAELQEAISDLQSKLRLAPDKLKSTESELKKKEKRRDEMLGLAPMRQSIIDLKEKEIPELRNKLQNVNRDIQRLKNDIEEQETLLGTIMPEEESAKVCLTDVTIMERFQMELKDVERKIAQQAAKLQGIDLDRTVQQVNQEKQEKQHKLDTVSSKIELNRKLIQDQQEQIQHLKSTTNELKSEKLQISTNLQRRQQLEEQTVELSTEVQSLYREIKDAKEQVSPLETTLEKFQQEKEELINKKNTSNKIAQDKLNDIKEKVKNIHGYMKDIENHIQDGKDDYMKQKETELNKVIAQLSECEKHKEKINEDMRLMRQDIDTQKIQERWLQDNLTLRKRNEELKEVEEEGKQHLKEMGQMQVLQMKSEHQKLEENIDNIKRNHNLALGRQKGYEEEIIHFKKELREPQFRDAEEKYREMMIVMRTTELVNKDLDIYYKTLDQAIMKFHSMKMEEINKIIRDLWRSTYRGQDIEYIEIRSDADENVSASDKRRNYNYRVVMLKGDTALDMRGRCSAGQKVLASLIIRLALAETFCLNCGIIALDEPTTNLDRENIESLAHALVEIIKSRSQQRNFQLLVITHDEDFVELLGRSEYVEKFYRIKKNIDQCSEIVKCSVSSLGFNVH

SEQ ID NO: 147 - DNA, 816 bp, Homo sapiens
atgcactttctttgccaaaggcaaacgcagaacgtttcagagccatgaggatgcttctgcatttgagtttgctagctcttggagctgcctacgtgtatgccatccccacagaaattcccacaagtgcattggtgaaagagaccttggcactgctttctactcatcgaactctgctgatagccaatgagactctgaggattcctgttcctgtacataaaaatcaccaactgtgcactgaagaaatctttcagggaataggcacactggagagtcaaactgtgcaagggggtactgtggaaagactattcaaaaacttgtccttaataaagaaatacattgacggccaaaaaaaaaagtgtggagaagaaagacggagagtaaaccaattcctagactacctgcaagagtttcttggtgtaatgaacaccgagtggataatagaaagttgagactaaactggtttgttgcagccaaagattttggaggagaaggacattttactgcagtgagaatgagggccaagaaagagtcaggccttaattttcaatataatttaacttcagagggaaagtaaatatttcaggcatactgacactttgccagaaagcataaaattcttaaaatatatttcagatatcagaatcattgaagtattttcctccaggcaaaattgatatacttttttcttatttaacttaacattctgtaaaatgtctgttaacttaatagtatttatgaaatggttaagaatttggtaaattagtatttatttaatgttatgttgtgttctaataaaacaaaaatagacaactgttc

SEQ ID NO: 148 - protein, 134 aa, Homo sapiens
MRMLLHLSLLALGAAYVYAIPTEIPTSALVKETLALLSTHRTLLIANETLRIPVPVHKNHQLCTEEIFQGIGTLESQTVQGGTVERLFKNLSLIKKYIDGQKKKCGEERRRVNQFLDYLQEFLGVMNTEWIIES

SEQ ID NO: 149 - DNA, 2035 bp, Homo sapiens
cgagccccgccgaaccgaggccacccggagccgtgcccagtccacgccggccgtgcccggcggccttaagaaccaggcaacctctgccttcttccctcttccactcggagtcgcgctccgcgcgccctcactgcagcccctgcgtcgccgggaccctcgcgcgcgaccagccgaatcgctcctgcagcagagccaacatgcccatcactcggatgcgcatgagaccctggctagagatgcagattaattccaaccaaatcccggggctcatctggattaataaagaggagatgatcttccagatcccatggaagcatgctgccaagcatggctgggacatcaacaaggatgcctgtttgttccggagctgggccattcacacaggccgatacaaagcaggggaaaaggagccagatcccaagacgtggaaggccaactttcgctgtgccatgaactccctgccagatatcgaggaggtgaaagaccagagcaggaacaagggcagctcagctgtgcgagtgtaccggatgcttccacctctcaccaagaaccagagaaaagaaagaaagtcgaagtccagccgagatgctaagagcaaggccaagaggaagtcatgtggggattccagccctgataccttctctgatggactcagcagctccactctgcctgatgaccacagcagctacacagttccaggctacatgcaggacttggaggtggagcaggccctgactccagcactgtcgccatgtgctgtcagcagcactctccccgactggcacatcccagtggaagttgtgccggacagcaccagtgatctgtacaacttccaggtgtcacccatgccctccacctctgaagctacaacagatgaggatgaggaagggaaattacctgaggacatcatgaagctcttggagcagtcggagtggcagccaacaaacgtggatgggaaggggtacctactcaatgaacctggagtccagcccacctctgtctatggagactttagctgtaaggaggagccagaaattgacagcccagggggggatattgggctgagtctacagcgtgtcttcacagatctgaagaacatggatgccacctggctggacagcctgctgaccccagtccggttgccctccatccaggccattccctgtgcaccgtagcagggcccctgggcccctcttattcctctaggcaagcaggacctggcatcatggtggatatggtgcagagaagctggacttctgtgggcccctcaacagccaagtgtgaccccactgccaagtggggatgggcctccctccttgggtcattgacctctcagggcctggcaggccagtgtctgggtttttcttgtggtgtaaagctggccctgcctcctgggaagatgaggttctgagaccagtgtatcaggtcagggacttggacaggagtcagtgtctggctttttcctctgagcccagctgcctggagagggtctcgctgtcactggctggctcctaggggaacagaccagtgaccccagaaaagcataacaccaatcccagggctggctctgcactaagcgaaaattgcactaaatgaatctcgttccaaagaactaccccttttcagctgagccctggggactgttccaaagccagtgaatgtgaaggaaactcccctccttcggggcaatgctccctcagcctcagaggagctctaccctgctccctgctttggctgaggggcttgggaaaaaaacttggcactttttcgtgtggatcttgccacatttctgatcagaggtgtacactaacatttcccccgagctcttggcctttgcatttatttatacagtgccttgctcggggcccaccaccccctcaagccccagcagccctcaacaggcccagggagggaagtgtgagcgccttggtatgacttaaaattggaaatgtcatctaaccattaagtcatgtgtgaacacataaggacgtgtgtaaatatgtacatttgtctttttataaaaagtaaaattgtt

SEQ ID NO: 150 - protein, 325 aa, Homo sapiens
MPITRMRMRPWLEMQINSNQIPGLIWINKEEMIFQIPWKHAAKHGWDINKDACLFRSWAIHTGRYKAGEKEPDPKTWKANFRCAMNSLPDIEEVKDQSRNKGSSAVRVYRMLPPLTKNQRKERKSKSSRDAKSKAKRKSCGDSSPDTFSDGLSSSTLPDDHSSYTVPGYMQDLEVEQALTPALSPCAVSSTLPDWHIPVEVVPDSTSDLYNFQVSPMPSTSEATTDEDEEGKLPEDIMKLLEQSEWQPTNVDGKGYLLNEPGVQPTSVYGDFSCKEEPEIDSPGGDIGLSLQRVFTDLKNMDATWLDSLLTPVRLPSIQAIPCAP

SEQ ID NO: 151 - DNA, 2256 bp, Homo sapiens
tcagagtccggctcaggctccggctgcggctccagcccgcgatgccccattccgtgaccctgcgcgggccttcgccctggggcttccgcctggtgggcggccgggacttcagcgcgcccctcaccatctcacgggtccatgctggcagcaaggctgcattggctgccctgtgcccaggagacctgatccaggccatcaatggtgagagcacagagctcatgacacacctggaggcacagaaccgcatcaagggctgccacgatcacctcacactgtctgtgagcaggcctgagggcaggagctggcccagtgcccctgatgacagcaaggctcaggcacacaggatccacatcgatcctgagatccaggacggcagcccaacaaccagcaggcggccctcaggcaccgggactgggccagaagatggcagaccaagcctgggatctccatatggacaaccccctcgctttccagtccctcacaatggcagcagcgaggccaccctgccagcccagatgagcaccctgcatgtgtctccaccccccagcgctgacccagccagaggcctcccgcggagccgggactgcagagtcgacctgggctccgaggtgtacaggatgctgcgggagccagccgagcccgtggccgcggagcccaagcagtcaggctccttccgctacttgcagggcatgctagaggccggcgagggcggggattggcccgggcctggcggcccccggaacctcaagcccacggccagcaagctgggcgctccgctgagcggcctgcaggggctgcccgagtgcacgcgctgcggccacggcatcgtgggcaccatcgtcaaggcacgggacaagctctaccatcccgagtgcttcatgtgcagtgactgcggcctgaacctcaagcagcgtggttacttctttctggacgagcggctctactgtgagagccacgccaaggcgcgcgtgaagccgcccgagggctacgacgtggtggcggtgtaccccaatgccaaggtggaactcgtctgagctgggaccctgctcccacgcctgcttcttaaggtccctgctcggccggtgtaaatatgtttcaccctgtccctctaataaagctcctctgctccaccttgaacctgtcacctggcctgccaccctcctgcgcaggccatgcatggctcccgagtacagtagtatctgcttaggtgccaggcatgtcctaggctctgggtgcagtagtgagcaggacgggtaccatgctgccctgaaggggccacagcctgggtggaaggcagacctgaatcacaacgggccagctctagtaatacgaaggtgaggtctgggatgctgcgtgcggcgcgacgacaggaggtatgacctgggtggggtcagggaaagtcttagctgagaactaagagatgagggaggcacaaactctgcacgggggaactgtgtgtgcaaaggtgagctgggggcgagaaaggcctctgtggccgtcatcggcactagcgggttgggggtggtggtggggtgctggcagcctcaggagcgatcgctcccctggagagggtgattgagtgtggagatcaccggggccgccgcgggccgtctgcacttctgttccaggtttttctggcattttctgttccaggtttcttccacccacgagcactttattctcctccgagacccccttttcttccccttcctctctcccaccagggggcgcgcttaaatttccagacagagaccagaaggaaggtttagaaagaaaagaacacttgcccagggcagctttgccctccaagaggctccctcctgtctctaagtcaattccacccctcctcgaagtcccggcttccacccctctcctcagagtcccggcgtttacctcgtggtgtgtttgccttgggcctttcatgccccggctgcacacatcgtctgtgaattgtggctgttcactcccgaggatgtgtcctagactccgggtcgcgtggatctaccctctagtttacttgctcgggagaagaaactgactcgttttatttagtgcctatttagcgagcccagagtaacgtacatttgtgctgttttcaattttgtgctatcgcaaatcacaaaaaaactgttatcaattcacattcatcatcagcacgagacccatttccttgtgctcctgccagctcaggatattatgtttcttttttcatttttgccagtctgttaagtaaaatgtcatatgcgtttgttttaa

SEQ ID NO: 152 - protein, 330 aa, Homo sapiens
MPHSVTLRGPSPWGFRLVGGRDFSAPLTISRVHAGSKAALAALCPGDLIQAINGESTELMTHLEAQNRIKGCHDHLTLSVSRPEGRSWPSAPDDSKAQAHRIHIDPEIQDGSPTTSRRPSGTGTGPEDGRPSLGSPYGQPPRFPVPHNGSSEATLPAQMSTLHVSPPPSADPARGLPRSRDCRVDLGSEVYRMLREPAEPVAAEPKQSGSFRYLQGMLEAGEGGDWPGPGGPRNLKPTASKLGAPLSGLQGLPECTRCGHGIVGTIVKARDKLYHPECFMCSDCGLNLKQRGYFFLDERLYCESHAKARVKPPEGYDVVAVYPNAKVELV

SEQ ID NO: 153 - DNA, 778 bp, Homo sapiens
aggaaaggctaaagttctctggaggatgtggctgcagagcctgctgctcttgggcactgtggcctgcagcatctctgcacccgcccgctcgcccagccccagcacgcagccctgggagcatgtgaatgccatccaggaggcccggcgtctcctgaacctgagtagagacactgctgctgagatgaatgaaacagtagaagtcatctcagaaatgtttgacctccaggagccgacctgcctacagacccgcctggagctgtacaagcagggcctgcggggcagcctcaccaagctcaagggccccttgaccatgatggccagccactacaagcagcactgccctccaaccccggaaacttcctgtgcaatccagactatcacctttgaaagtttcaaagagaacctgaaggactttctgcttgtcatcccctttgactgctgggagccagtccaggagtgagaccggccagatgaggctggccaagccggggagctgctctctcatgaaacaagagctagaaactcaggatggtcatcttggagggaccaaggggtgggccacagccatggtgggagtggcctggacctgccctgggccacactgaccctgatacaggcatggcagaagaatgggaatattttatactgacagaaatcagtaatatttatatatttatatttttaaaatatttatttatttatttatttaagttcatattccatatttattcaagatgttttaccgtaataattattattaaaaatatgcttctactta

SEQ ID NO: 154 - protein, 144 aa, Homo sapiens
MWLQSLLLLGTVACSISAPARSPSPSTQPWEHVNAIQEARRLLNLSRDTAAEMNETVEVISEMFDLQEPTCLQTRLELYKQGLRGSLTKLKGPLTMMASHYKQHCPPTPETSCAIQTITFESFKENLKDFLLVIPFDCWEPVQE

SEQ ID NO: 155 - DNA, 985 bp, Homo sapiens
cccggggttgtgggcaccttgctgctgcacatataaggcgggaggttgttgccaactcttcagagccccacgaaggaccagaacaagacagagtgcctcctgccgatccaaacatgagccgcctgcccgtcctgctcctgctccaactcctggtccgccccggactccaagctcccatgacccagacaacgtccttgaagacaagctgggttaactgctctaacatgatcgatgaaattataacacacttaaagcagccacctttgcctttgctggacttcaacaacctcaatggggaagaccaagacattctgatggaaaataaccttcgaaggccaaacctggaggcattcaacagggctgtcaagagtttacagaacgcatcagcaattgagagcattcttaaaaatctcctgccatgtctgcccctggccacggccgcacccacgcgacatccaatccatatcaaggacggtgactggaatgaattccggaggaaactgacgttctatctgaaaacccttgagaatgcgcaggctcaacagacgactttgagcctcgcgatcttttgagtccaacgtccagctcgttctctgggccttctcaccacagagcctcgggacatcaaaaacagcagaacttctgaaacctctgggtcatctctcacacattccaggaccagaagcatttcaccttttcctgcggcatcagatgaattgttaattatctaatttctgaaatgtgcagctcccatttggccttgtgcggttgtgttctcatttttatcccattgagactatttatttatgtatgtatgtatttatttatttattgcctggagtgtgaactgtatttattttagcagaggagccatgtcctgctgcttctgcaaaaaactcagagtggggtggggagcatgttcatttgtacctcgagttttaaactggttcctagggatgtgtgagaataaactagactctgaaca

SEQ ID NO: 156 - protein, 152 aa, Homo sapiens
MSRLPVLLLLQLLVRPGLQAPMTQTTSLKTSWVNCSNMIDEIITHLKQPPLPLLDFNNLNGEDQDILMENNLRRPNLEAFNRAVKSLQNASAIESILKNLLPCLPLATAAPTRHPIHIKDGDWNEFRRKLTFYLKTLENAQAQQTTLSLAIF

SEQ ID NO: 157 - DNA, 1821 bp, Homo sapiens
acaaggaggcaggcaagacagcaaggcatagagacaacatagagctaagtaaagccagtggaaatgaagagtcttccaatcctactgttgctgtgcgtggcagtttgctcagcctatccattggatggagctgcaaggggtgaggacaccagcatgaaccttgttcagaaatatctagaaaactactacgacctcaaaaaagatgtgaaacagtttgttaggagaaaggacagtggtcctgttgttaaaaaaatccgagaaatgcagaagttccttggattggaggtgacggggaagctggactccgacactctggaggtgatgcgcaagcccaggtgtggagttcctgatgttggtcacttcagaacctttcctggcatcccgaagtggaggaaaacccaccttacatacaggattgtgaattatacaccagatttgccaaaagatgctgttgattctgctgttgagaaagctctgaaagtctgggaagaggtgactccactcacattctccaggctgtatgaaggagaggctgatataatgatctcttttgcagttagagaacatggagacttttacccttttgatggacctggaaatgttttggcccatgcctatgcccctgggccagggattaatggagatgcccactttgatgatgatgaacaatggacaaaggatacaacagggaccaatttatttctcgttgctgctcatgaaattggccactccctgggtctctttcactcagccaacactgaagctttgatgtacccactctatcactcactcacagacctgactcggttccgcctgtctcaagatgatataaatggcattcagtccctctatggacctccccctgactcccctgagacccccctggtacccacggaacctgtccctccagaacctgggacgccagccaactgtgatcctgctttgtcctttgatgctgtcagcactctgaggggagaaatcctgatctttaaagacaggcacttttggcgcaaatccctcaggaagcttgaacctgaattgcatttgatctcttcattttggccatctcttccttcaggcgtggatgccgcatatgaagttactagcaaggacctcgttttcatttttaaaggaaatcaattctgggccatcagaggaaatgaggtacgagctggatacccaagaggcatccacaccctaggtttccctccaaccgtgaggaaaatcgatgcagccatttctgataaggaaaagaacaaaacatatttctttgtagaggacaaatactggagatttgatgagaagagaaattccatggagccaggctttcccaagcaaatagctgaagactttccagggattgactcaaagattgatgctgtttttgaagaatttgggttcttttatttctttactggatcttcacagttggagtttgacccaaatgcaaagaaagtgacacacactttgaagagtaacagctggcttaattgttgaaagagatatgtagaaggcacaatatgggcactttaaatgaagctaataattcttcacctaagtctctgtgaattgaaatgttcgttttctcctgcctgtgctgtgactcgagtcacactcaagggaacttgagcgtgaatctgtatcttgccggtcatttttatgttattacagggcattcaaatgggctgctgcttagcttgcaccttgtcacatagagtgatctttcccaagagaaggggaagcactcgtgtgcaacagacaagtgactgtatctgtgtagactatttgcttatttaataaagacgatttgtcagttgtttt

SEQ ID NO: 158 - protein, 477 aa, Homo sapiens
MKSLPILLLLCVAVCSAYPLDGAARGEDTSMNLVQKYLENYYDLKKDVKQFVRRKDSGPVVKKIREMQKFLGLEVTGKLDSDTLEVMRKPRCGVPDVGHFRTFPGIPKWRKTHLTYRIVNYTPDLPKDAVDSAVEKALKVWEEVTPLTFSRLYEGEADIMISFAVREHGDFYPFDGPGNVLAHAYAPGPGINGDAHFDDDEQWTKDTTGTNLFLVAAHEIGHSLGLFHSANTEALMYPLYHSLTDLTRFRLSQDDINGIQSLYGPPPDSPETPLVPTEPVPPEPGTPANCDPALSFDAVSTLRGEILIFKDRHFWRKSLRKLEPELHLISSFWPSLPSGVDAAYEVTSKDLVFIFKGNQFWAIRGNEVRAGYPRGIHTLGFPPTVRKIDAAISDKEKNKTYFFVEDKYWRFDEKRNSMEPGFPKQIAEDFPGIDSKIDAVFEEFGFFYFFTGSSQLEFDPNAKKVTHTLKSNSWLNC

SEQ ID NO: 159 - DNA, 1627 bp, Homo sapiens
gaagaaaccaccggaaggaaccatctcactgtgtgtaaacatgacttccaagctggccgtggctctcttggcagccttcctgatttctgcagctctgtgtgaaggtgcagttttgccaaggagtgctaaagaacttagatgtcagtgcataaagacatactccaaacctttccaccccaaatttatcaaagaactgagagtgattgagagtggaccacactgcgccaacacagaaattattgtaaagctttctgatggaagagagctctgtctggaccccaaggaaaactgggtgcagagggttgtggagaagtttttgaagagggctgagaattcataaaaaaattcattctctgtggtatccaagaatcagtgaagatgccagtgaaacttcaagcaaatctacttcaacacttcatgtattgtgtgggtctgttgtagggttgccagatgcaatacaagattcctggttaaatttgaatttcagtaaacaatgaatagtttttcattgtaccatgaaatatccagaacatacttatatgtaaagtattatttatttgaatctacaaaaaacaacaaataatttttaaatataaggattttcctagatattgcacgggagaatatacaaatagcaaaattgaggccaagggccaagagaatatccgaactttaatttcaggaattgaatgggtttgctagaatgtgatatttgaagcatcacataaaaatgatgggacaataaattttgccataaagtcaaatttagctggaaatcctggatttttttctgttaaatctggcaaccctagtctgctagccaggatccacaagtccttgttccactgtgccttggtttctcctttatttctaagtggaaaaagtattagccaccatcttacctcacagtgatgttgtgaggacatgtggaagcactttaagttttttcatcataacataaattattttcaagtgtaacttattaacctatttattatttatgtatttatttaagcatcaaatatttgtgcaagaatttggaaaaatagaagatgaatcattgattgaatagttataaagatgttatagtaaatttattttattttagatattaaatgatgttttattagataaatttcaatcagggtttttagattaaacaaacaaacaattgggtacccagttaaattttcatttcagatatacaacaaataattttttagtataagtacattattgtttatctgaaattttaattgaactaacaatcctagtttgatactcccagtcttgtcattgccagctgtgttggtagtgctgtgttgaattacggaataatgagttagaactattaaaacagccaaaactccacagtcaatattagtaatttcttgctggttgaaacttgtttattatgtacaaatagattcttataatattatttaaatgactgcatttttaaatacaaggctttatatttttaactttaagatgtttttatgtgctctccaaattttttttactgtttctgattgtatggaaatataaaagtaaatatgaaacatttaaaatataatttgttgtcaaagtaaaaaaaaaaaaaaaaaaaaaaaaaaaaaaaaaaaaa

SEQ ID NO: 160 - protein, 99 aa, Homo sapiens
MTSKLAVALLAAFLISAALCEGAVLPRSAKELRCQCIKTYSKPFHPKFIKELRVIESGPHCANTEIIVKLSDGRELCLDPKENWVQRVVEKFLKRAENS

SEQ ID NO: 161 - DNA, 3934 bp, Homo sapiens
cctctcaccctttagcccagaactgctttgaatacaccaattgctgtggggcggctcgaggaagagaagacaccagtgcctcagaaactgctcggtcagacggtgatagcgagccacgcattcacagggccactgctgctcacagaagcagtgaggatgatgccaggatgatgtctgcctcgcgcctggctgggactctgatcccagccatggccttcctctcctgcgtgagaccagaaagctgggagccctgcgtggagacttggccctaaaccacacagaagagctggcatgaaacccagagctttcagactccggagcctcagcccttcaccccgattccattgcttcttgctaaatgctgccgttttatcacggaggtggttcctaatattacttatcaatgcatggagctgaatttctacaaaatccccgacaacctccccttctcaaccaagaacctggacctgagctttaatcccctgaggcatttaggcagctatagcttcttcagtttcccagaactgcaggtgctggatttatccaggtgtgaaatccagacaattgaagatggggcatatcagagcctaagccacctctctaccttaatattgacaggaaaccccatccagagtttagccctgggagccttttctggactatcaagtttacagaagctggtggctgtggagacaaatctagcatctctagagaacttccccattggacatctcaaaactttgaaagaacttaatgtggctcacaatcttatccaatctttcaaattacctgagtatttttctaatctgaccaatctagagcacttggacctttccagcaacaagattcaaagtatttattgcacagacttgcgggttctacatcaaatgcccctactcaatctctctttagacctgtccctgaaccctatgaactttatccaaccaggtgcatttaaagaaattaggcttcataagctgactttaagaaataattttgatagtttaaatgtaatgaaaacttgtattcaaggtctggctggtttagaagtccatcgtttggttctgggagaatttagaaatgaaggaaacttggaaaagtttgacaaatctgctctagagggcctgtgcaatttgaccattgaagaattccgattagcatacttagactactacctcgatgatattattgacttatttaattgtttgacaaatgtttcttcattttccctggtgagtgtgactattgaaagggtaaaagacttttcttataatttcggatggcaacatttagaattagttaactgtaaatttggacagtttcccacattgaaactcaaatctctcaaaaggcttactttcacttccaacaaaggtgggaatgctttttcagaagttgatctaccaagccttgagtttctagatctcagtagaaatggcttgagtttcaaaggttgctgttctcaaagtgattttgggacaaccagcctaaagtatttagatctgagcttcaatggtgttattaccatgagttcaaacttcttgggcttagaacaactagaacatctggatttccagcattccaatttgaaacaaatgagtgagttttcagtattcctatcactcagaaacctcatttaccttgacatttctcatactcacaccagagttgctttcaatggcatcttcaatggcttgtccagtctcgaagtcttgaaaatggctggcaattctttccaggaaaacttccttccagatatcttcacagagctgagaaacttgaccttcctggacctctctcagtgtcaactggagcagttgtctccaacagcatttaactcactctccagtcttcaggtactaaatatgagccacaacaacttcttttcattggatacgtttccttataagtgtctgaactccctccaggttcttgattacagtctcaatcacataatgacttccaaaaaacaggaactacagcattttccaagtagtctagctttcttaaatcttactcagaatgactttgcttgtacttgtgaacaccagagtttcctgcaatggatcaaggaccagaggcagctcttggtggaagttgaacgaatggaatgtgcaacaccttcagataagcagggcatgcctgtgctgagtttgaatatcacctgtcagatgaataagaccatcattggtgtgtcggtcctcagtgtgcttgtagtatctgttgtagcagttctggtctataagttctattttcacctgatgcttcttgctggctgcataaagtatggtagaggtgaaaacatctatgatgcctttgttatctactcaagccaggatgaggactgggtaaggaatgagctagtaaagaatttagaagaaggggtgcctccatttcagctctgccttcactacagagactttattcccggtgtggccattgctgccaacatcatccatgaaggtttccataaaagccgaaaggtgattgttgtggtgtcccagcacttcatccagagccgctggtgtatctttgaatatgagattgctcagacctggcagtttctgagcagtcgtgctggtatcatcttcattgtcctgcagaaggtggagaagaccctgctcaggcagcaggtggagctgtaccgccttctcagcaggaacacttacctggagtgggaggacagtgtcctggggcggcacatcttctggagacgactcagaaaagccctgctggatggtaaatcatggaatccagaaggaacagtgggtacaggatgcaattggcaggaagcaacatctatctgaagaggaaaaataaaaacctcctgaggcatttcttgcccagctgggtccaacacttgttcagttaataagtattaaatgctgccacatgtcaggccttatgctaagggtgagtaattccatggtgcactagatatgcagggctgctaatctcaaggagcttccagtgcagagggaataaatgctagactaaaatacagagtcttccaggtgggcatttcaaccaactcagtcaaggaacccatgacaaagaaagtcatttcaactcttacctcatcaagttgaataaagacagagaaaacagaaagagacattgttcttttcctgagtcttttgaatggaaattgtattatgttatagccatcataaaaccattttggtagttttgactgaactgggtgttcactttttcctttttgattgaatacaatttaaattctacttgatgactgcagtcgtcaaggggctcctgatgcaagatgccccttccattttaagtctgtctccttacagaggttaaagtctagtggctaattcctaaggaaacctgattaacacatgctcacaaccatcctggtcattctcgagcatgttctattttttaactaatcacccctgatatatttttatttttatatatccagttttcatttttttacgtcttgcctataagctaatatcataaataaggttgtttaagacgtgcttcaaatatccatattaaccactatttttcaaggaagtatggaaaagtacactctgtcactttgtcactcgatgtcattccaaagttattgcctactaagtaatgactgtcatgaaagcagcattgaaataatttgtttaaagggggcactcttttaaacgggaagaaaatttccgcttcctggtcttatcatggacaatttgggctagaggcaggaaggaagtgggatgacctcaggaggtcaccttttcttgattccagaaacatatgggctgataaacccggggtgacctcatgaaatgagttgcagcagaagtttatttttttcagaacaagtgatgtttgatggacctctgaatctctttagggagacacagatggctgggatccctcccctgtacccttctcactgccaggagaacta

SEQ ID NO: 162 - protein, 799 aa, Homo sapiens
MELNFYKIPDNLPFSTKNLDLSFNPLRHLGSYSFFSFPELQVLDLSRCEIQTIEDGAYQSLSHLSTLILTGNPIQSLALGAFSGLSSLQKLVAVETNLASLENFPIGHLKTLKELNVAHNLIQSFKLPEYFSNLTNLEHLDLSSNKIQSIYCTDLRVLHQMPLLNLSLDLSLNPMNFIQPGAFKEIRLHKLTLRNNFDSLNVMKTCIQGLAGLEVHRLVLGEFRNEGNLEKFDKSALEGLCNLTIEEFRLAYLDYYLDDIIDLFNCLTNVSSFSLVSVTIERVKDFSYNFGWQHLELVNCKFGQFPTLKLKSLKRLTFTSNKGGNAFSEVDLPSLEFLDLSRNGLSFKGCCSQSDFGTTSLKYLDLSFNGVITMSSNFLGLEQLEHLDFQHSNLKQMSEFSVFLSLRNLIYLDISHTHTRVAFNGIFNGLSSLEVLKMAGNSFQENFLPDIFTELRNLTFLDLSQCQLEQLSPTAFNSLSSLQVLNMSHNNFFSLDTFPYKCLNSLQVLDYSLNHIMTSKKQELQHFPSSLAFLNLTQNDFACTCEHQSFLQWIKDQRQLLVEVERMECATPSDKQGMPVLSLNITCQMNKTIIGVSVLSVLVVSVVAVLVYKFYFHLMLLAGCIKYGRGENIYDAFVIYSSQDEDWVRNELVKNLEEGVPPFQLCLHYRDFIPGVAIAANIIHEGFHKSRKVIVVVSQHFIQSRWCIFEYEIAQTWQFLSSRAGIIFIVLQKVEKTLLRQQVELYRLLSRNTYLEWEDSVLGRHIFWRRLRKALLDGKSWNPEGTVGTGCNWQEATSI

SEQ ID NO: 163 - DNA, 1182 bp, Homo sapiens
tagttctccctgagtgagacttgcctgcttctctggcccctggtcctgtcctgttctccagcatggtgtgtctgaagctccctggaggctcctgcatgacagcgctgacagtgacactgatggtgctgagctccccactggctttggctggggacacccgaccacgtttcttgtggcagcttaagtttgaatgtcatttcttcaatgggacggagcgggtgcggttgctggaaagatgcatctataaccaagaggagtccgtgcgcttcgacagcgacgtgggggagtaccgggcggtgacggagctggggcggcctgatgccgagtactggaacagccagaaggacctcctggagcagaggcgggccgcggtggacacctactgcagacacaactacggggttggtgagagcttcacagtgcagcggcgagttgagcctaaggtgactgtgtatccttcaaagacccagcccctgcagcaccacaacctcctggtctgctctgtgagtggtttctatccaggcagcattgaagtcaggtggttccggaacggccaggaagagaaggctggggtggtgtccacaggcctgatccagaatggagattggaccttccagaccctggtgatgctggaaacagttcctcggagtggagaggtttacacctgccaagtggagcacccaagtgtgacgagccctctcacagtggaatggagagcacggtctgaatctgcacagagcaagatgctgagtggagtcgggggcttcgtgctgggcctgctcttccttggggccgggctgttcatctacttcaggaatcagaaaggacactctggacttcagccaacaggattcctgagctgaaatgcagatgaccacattcaaggaagaaccttctgtcccagctttgcagaatgaaaagctttcctgcttggcagttattcttccacaagagagggctttctcaggacctggttgctactggttcggcaactgcagaaaatgtcctcccttgtggcttcctcagctcctgcccttggcctgaagtcccagcattgatgacagcgcctcatcttcaacttttgtgctcccctttgcctaaaccgtatggcctcccgtgcatctgtactcaccctgtacgacaaacacattacattattaaatgtttctcaaagatggagtt

SEQ ID NO: 164 - protein, 266 aa, Homo sapiens
MVCLKLPGGSCMTALTVTLMVLSSPLALAGDTRPRFLWQLKFECHFFNGTERVRLLERCIYNQEESVRFDSDVGEYRAVTELGRPDAEYWNSQKDLLEQRRAAVDTYCRHNYGVGESFTVQRRVEPKVTVYPSKTQPLQHHNLLVCSVSGFYPGSIEVRWFRNGQEEKAGVVSTGLIQNGDWTFQTLVMLETVPRSGEVYTCQVEHPSVTSPLTVEWRARSESAQSKMLSGVGGFVLGLLFLGAGLFIYFRNQKGHSGLQPTGFLS

SEQ ID NO: 165 - DNA, 681 bp, Homo sapiens
  modified_base (67)..(67): a, c, t, g, unknown or other
acgtcactgtcttgaagcagcagtagcctgggaagtgaggcaggaggaattgagaggcaggaagggngctggagacacagctgagcctggaaatgagagtgggcatcgccgtggtcatcatgactcctctgcggcgtggtcaccatgttggttcactgtgttgggctcttattgacgggtctcctgctaggcctgaccttgggtgccggagccctgctggcttctgagcctatctaccaaccaccttcagcctgggtgccagctggggggctggtggggctggcgctgctgggagccctgctcacacttcggtggccacgtccattcacagttctgggcacaaccctgctgggttctgcagtgcttgtggcctgtgttgactacttcctggaggggctggcactggggagttggctgggccaacgcctgcagacacttccagccttgccttctctctgctgatatagctgggtcttactggggatctggccagccttgggggcccttggagccctggcccagtggaagctcgtgcctgaggaacatggaggccacgctaatgggtctgttcctggtttcccagatgcataaaggaagacatatccctcccctgggcagcaaggctacaatgggagggagggagaacatgggagcatgtgaataaaatggcattaaatactg

SEQ ID NO: 166 - protein, 105 aa, Homo sapiens
MLVHCVGLLLTGLLLGLTLGAGALLASEPIYQPPSAWVPAGGLVGLALLGALLTLRWPRPFTVLGTTLLGSAVLVACVDYFLEGLALGSWLGQRLQTLPALPSLC

SEQ ID NO: 167 - DNA, 946 bp, Homo sapiens
ccgggtcgactactactactactaaattcgcggccgcgtcgaccgccccttggcttctgcactgatggtgggtggatgagtaatgcatccaggaagcctggaggcctgtggtttccgcacccgctgccacccccgcccctagcgtggacatttatcctctagcgctcaggccctgccgccatcgccgcagatccagcgcccagagagacaccagagaacccaccatggccccctttgagcccctggcttctggcatcctgttgttgctgtggctgatagcccccagcagggcctgcacctgtgtcccaccccacccacagacggccttctgcaattccgacctcgtcatcagggccaagttcgtggggacaccagaagtcaaccagaccaccttataccagcgttatgagatcaagatgaccaagatgtataaagggttccaagccttaggggatgccgctgacatccggttcgtctacacccccgccatggagagtgtctgcggatacttccacaggtcccacaaccgcagcgaggagtttctcattgctggaaaactgcaggatggactcttgcacatcactacctgcagtttcgtggctccctggaacagcctgagcttagctcagcgccggggcttcaccaagacctacactgttggctgtgaggaatgcacagtgtttccctgtttatccatcccctgcaaactgcagagtggcactcattgcttgtggacggaccagctcctccaaggctctgaaaagggcttccagtcccgtcaccttgcctgcctgcctcgggagccagggctgtgcacctggcagtccctgcggtcccagatagcctgaatcctgcccggagtggaagctgaagcctgcacagtgtccaccctgttcccactcccatctttcttccggacaatgaaataaagagttaccacccagca

SEQ ID NO: 168 - protein, 207 aa, Homo sapiens
MAPFEPLASGILLLLWLIAPSRACTCVPPHPQTAFCNSDLVIRAKFVGTPEVNQTTLYQRYEIKMTKMYKGFQALGDAADIRFVYTPAMESVCGYFHRSHNRSEEFLIAGKLQDGLLHITTCSFVAPWNSLSLAQRRGFTKTYTVGCEECTVFPCLSIPCKLQSGTHCLWTDQLLQGSEKGFQSRHLACLPREPGLCTWQSLRSQIA

SEQ ID NO: 169 - DNA, 1462 bp, Homo sapiens
gcccgcgccgcgccgctctttctccgacagctgccgggggtgccctgcaagctgttccgcgcgtcctgcccgtctgtccccgcgggtcgtcgcccgccacagccgcgccatgaccacccagcagatagacctccagggcccggggccgtggggcttccgcctcgtgggcggcaaggacttcgagcagcctctcgccatttcccgggtcactcctggaagcaaggcggctctagctaatttatgtattggagatgtaatcacagccattgatggggaaaatactagcaatatgacacacttggaagctcagaacagaatcaaaggctgcacagacaacttgactctcactgtagccagatctgaacataaagtctggtctcctctggtgacggaggaagggaagcgtcatccatacaagatgaatttagcctctgaaccccaggaggtcctgcacataggaagcgcccacaaccgaagtgccatgccctttaccgcctcgcctgcctccagcactactgccagggtcatcacaaaccagtacaacaacccagctggcctctactcttctgaaaatatctccaacttcaacaatgccctggagtcaaagactgctgccagcggggtggaggcgaacagcagacccttagaccatgctcagcctccaagcagccttgtcatcgacaaagaatctgaagtttacaagatgcttcaggagaaacaggagttgaatgagcccccgaaacagtccacgtctttcttggttttgcaggaaatcctggagtctgaagaaaaaggggatcccaacaagccctcaggattcagaagtgttaaagctcctgtcactaaagtggctgcgtcgattggaaatgctcagaagttgcctatgtgtgacaaatgtggcactgggattgttggtgtgtttgtgaagctgcgggaccgtcaccgccaccctgagtgttatgtgtgcactgactgtggcaccaacctgaaacagaagggccatttctttgtggaggatcaaatctactgtgagaagcatgcccgggagcgagtcacaccacctgagggttatgaagtggtcactgtgttccccaagtgagccagcagatctgaccactgttctccagcaggcctctgctgcagctttttctctcagtgttctggccctctcctctcttgaaagttctctgcttactttggttttccctctgcttgtaaaacattgagtcccctccctgccttggttaattgactcacaccagctgtgcgatgcccgcttttacaattaaaggaaaactgttttgttcagtgtcaccttgtcagcaacactgtgtcccttcgccccaccgttcttctctgctgcatttggacatcagccaaatttgaacccaatcaaatataacgtgtctgacactgattttgtttttactcaataaatgtatagactacaaaaaaaaaaaaa

SEQ ID NO: 170 - protein, 329 aa, Homo sapiens
MTTQQIDLQGPGPWGFRLVGGKDFEQPLAISRVTPGSKAALANLCIGDVITAIDGENTSNMTHLEAQNRIKGCTDNLTLTVARSEHKVWSPLVTEEGKRHPYKMNLASEPQEVLHIGSAHNRSAMPFTASPASSTTARVITNQYNNPAGLYSSENISNFNNALESKTAASGVEANSRPLDHAQPPSSLVIDKESEVYKMLQEKQELNEPPKQSTSFLVLQEILESEEKGDPNKPSGFRSVKAPVTKVAASIGNAQKLPMCDKCGTGIVGVFVKLRDRHRHPECYVCTDCGTNLKQKGHFFVEDQIYCEKHARERVTPPEGYEVVTVFPK

SEQ ID NO: 171 - DNA, 1103 bp, Homo sapiens; identical to SEQ ID NO: 21

SEQ ID NO: 172 - protein, 107 aa, Homo sapiens; identical to SEQ ID NO: 22

SEQ ID NO: 173 - DNA, 1825 bp, Homo sapiens
tgcaattaaaggagtcgggtctctaactgttgatctgtttttttcccttctgagcaatggagcttaccatctttatcctgagactggccatttacatcctgacatttcccttgtacctgctgaactttctgggcttgtggagctggatatgcaaaaaatggttcccctacttcttggtgaggttcactgtgatatacaacgaacagatggcaagcaagaagcgggagctcttcagtaacctgcaggagtttgcgggcccctccgggaaactctccctgctggaagtgggctgtggcacgggggccaacttcaagttctacccacctgggtgcagggtgacctgtattgaccccaaccccaactttgagaagtttttgatcaagagcattgcagagaaccgacacctgcagtttgagcgctttgtggtagctgccggggagaacatgcaccaggtggctgatggctctgtggatgtggtggtctgcaccctggtgctgtgctctgtgaagaaccaggagcggattctccgcgaggtgtgcagagtgctgagaccgggaggggctttctatttcatggagcatgtggcagctgagtgttcgacttggaattacttctggcaacaagtcctggatcctgcctggcaccttctgtttgatgggtgcaacctgaccagagagagctggaaggccctggagcgggccagcttctctaagctgaagctgcagcacatccaggccccactgtcctgggagttggtgcgccctcatatctatggatatgctgtgaaatagtgtgagctggcagttaagagctgaatggctcaaagaatttaaagcttcagttttacatttaaaatgctaagtgggagaagagaaaccttttttttggggggcggtttttttggtttgttgttggttttttttttttttttggcaggagaatctcttgaacccagaaggcgaaggttgcagtgaaccgagatcatgccattgtactctagcctgggtgacaagagcaagactccgtctcaaaaaaaaaaaaaaaaaaaaaaagaagtagagacagggagacggggtctcactgtgttgcctaggccggtcttgaactcctgggctcaagtgattctcccaccttgacctcctaaattgttgggattacaggtgtgagacagtgcacctggccgaaatagctcaagtttctgaaaaacaaatctgaatctatttgttattcttagcgtcactggtctggctttcagaattaacatacaaggttgccacacctagttctgcccagctttatgtcttttattccagtattccaccaaagtttgttttcctgcattccagttctcaagtcttaagataaagattgtacttgacagtttagtatatccataaaactatttgaggtggttaaggttcttgggttcattttccttaatactttgctgaatattgtagattgtaggcaatgaaaaagtctactaaattaggaaaaccttgaataattaggtatcctaggtaagagcccctaaacatcaagcaatctgtgagtctgtaaagaaataaatattttttggattattcttatctaattccacccctgttggaagatgatttctttgttctttgcaactatggaagctgtgaaaatcatcacaagtgcctctgaaagcgagtgttaggttggttagagggtttaatattttctgcaatggtttgtaggaattttaataaatgtagtatattttctgagatgattttgtaaaagtactattttaaatatcaaatcaaccaataaattcacatttgtgttaggaacaaaa

SEQ ID NO: 174 - protein, 244 aa, Homo sapiens
MELTIFILRLAIYILTFPLYLLNFLGLWSWICKKWFPYFLVRFTVIYNEQMASKKRELFSNLQEFAGPSGKLSLLEVGCGTGANFKFYPPGCRVTCIDPNPNFEKFLIKSIAENRHLQFERFVVAAGENMHQVADGSVDVVVCTLVLCSVKNQERILREVCRVLRPGGAFYFMEHVAAECSTWNYFWQQVLDPAWHLLFDGCNLTRESWKALERASFSKLKLQHIQAPLSWELVRPHIYGYAVK

SEQ ID NO: 175 - DNA, 8042 bp, Homo sapiens
gtctcctgctatcaggtaatgccaacctcaaccccctggaccagtcaccccgatcagactttgcttgcctgattttaggccaggtcagacatcagaggagagcccagatccttgtttcctctccccccgcagggcttcccctttcttggtcatcgatccctagagctctggctctttctcttcttggggtgagaaactgctaagaacagtttatttcccatgcatgcatctgggcttgccactgatctgccttttcccccctcctccccaggttagggacacctgggtccaaccttcccaaggaatatggggatgggggttggagatgaagtttagtgctagactgtaaggtaggtggggtggaagtacatgagggaaagggctaaaatggtactaatggtgttaaggatagggtgaattatttaagaggaaaaagactaggcccaggttctccttagccatgtggctttcccagggcagagggtggcccctccctacccaggggcccagcagagactgacttttgatccctaccccagagaccagtgaaccattaactcctctcttatgtgagccttcacacactggccccacccctgaccccgccccaaggcaggtgggctaggagggggtgcatgtccatctcagccttctatgtgacgtggcctccgatccacctggacacctggaggctaagcctggattcccccttccctgactcaggaactgcttaacgtctacagcaaggcctaataggggacctgagggcacagtcctcaggatgtttcggggagaataggagccagaacctgagcccctaagctattcccctcaccaatgatggggtccccagtgagtcatctgctggccggcttctgtgtgtgggtcgtcttgggctgggtagggggctcagtccccaacctgggccctgctgagcaggagcagaaccattacctggcccagctgtttggcctgtacggcgagaatgggacgctgactgcagggggcttggcgcggcttctccacagcctggggctaggccgagttcaggggcttcgcctgggacagcatgggcctctgactggacgggctgcatccccagctgcagacaattccacacacaggccacagaaccctgagctgagtgtggatgtctgggcagggatgcctctgggtccctcagggtggggtgacctggaagagtcaaaggcccctcacctaccccgtgggccagccccctcgggcctggacctccttcacaggcttctgttgctggaccactcattggctgaccacctgaatgaggattgtctgaacggctcccagctgctggtcaattttggcttgagccccgctgctcctctgacccctcgtcagtttgctctgctgtgcccagccctgctttatcagatcgacagccgcgtctgcatcggcgctccggcccctgcacccccaggggatctactatctgccctgcttcagagtgccctggcagtcctgttgctcagcctcccttctcccctatccctgctgctgctgcggctcctgggacctcgtctactacggcccttgctgggcttcctgggggccctggcggtgggcactctttgtggggatgcactgctacatctgctaccgcatgcacaagaagggcggcacgcaggacctggcggactaccagagaaggacctgggcccggggctgtcagtgctcggaggcctcttcctgctctttgtgctggagaacatgctggggcttttgcggcaccgagggctcaggccaagatgctgcaggcgaaaacgaaggaatctcgaaacacgcaacttggatccggagaatggcagtgggatggcccttcagcccctacaggcagctccagagccaggggctcagggccagagggagaagaacagccagcacccaccagctctggcccctcctgggcaccaaggccacagtcatgggcaccagggtggcactgatatcacgtggatggtcctcctgggagatggtctacacaacctcactgatgggctggccataggtgctgccttctctgatggcttctccagcggcctcagtaccaccttagcggtcttctgccatgagctgccccacgaactgggtgactttgccatgctgctccagtcagggctgtcctttcggcggctgctgctgctgagcctcgtgtctggagccctgggattggggggtgcagtcctgggggtggggctcagcctgggccctgtccccctcactccctgggtgtttggggtcactgctggggtcttcctctatgtggcccttgtggacatgctaccagccctgcttcgtcctccggagcccctgcctacgccccatgtgctcctgcaggggctggggctgctgctggggggcggcctcatgcttgccataaccctgctggaggagcggctactgcccgtgaccactgagggctgatggggccagtggaaaggggtcgggttgcccttccttccccccaaccacaggaatggaggcgggacacagggccagtaggagcaataggattttaataaacagaacccatcccaaagccatgactacgacagttgtacttgcaccaaaacagcatagaaaaccagagtgtggtgggaggacccgaagccggttgggggaggatgtgagtaggggcctggagggtgcagggtcattaatctgcggggagaacattgtgctttagcccagggaggggaggggtggggcaaatgcaccgaggtccccactttttcctgctgccctcggcaccctggggatgcaggcatctgggcacatctgccccttattgctgcccaccagcgttaaacgcccccgatcccaacactagcaccacaggtggttccggggcagggagaggcaggaatgggaaaattgcttagagaaagattccactagaatccagtgaattgtgctcagttctctttacttcctacaaccgagtacatgggtcacagggtggagggtgcaacaggacatggaacatgcccctccgtgccccccaacacacacctgcacacaggatggtggtgtctgcagcatcacaggtcatgcagggcatggggaaggggaggttcacacacacatagatgcccacagcgggtaccagacggagaacacccctgaatatacatagctgtacatggggaacccccaggtccccaccccaaccctctcccctgtcttgctgtcccccgcaggggaactatattgctttgagagagccaccccaggggctgctctgccaggcaccctcccctcccacccacccccattttggcacatctgcaagacacacagcagcgagagtaggcaccctcccttcccaggcttctgtggcctggagctggagaagggggtaggagacttcatcctccatcctcccctaacccttcccaaacccctgccaaacccactcaagccagaacccacccccaccccccaaacacacatacaaagctgagctatccaggaacacaagggaaacaaggagattgtccagggtgggagcggaggcagcgggggaagaagactggaagcagagacctccccccttgtggggggcagactggcacaacagctactttagtgcaattggagagggtgcccagagtgagaggtggagaagggagggaaggcggtccccaacttccctgggggcaaagtcaggcttccagattccccagggaaagggcctagcaggagtgggtgagggccaaggtggatcctctggttacccgccaccctctgccctcccaaatgcagtgacagtgtccccctcacacctaagtgggcaacagcagccttggagtcagtaccttcaagtaattcaaagagcagaccctccccaccccagcttcaccccatctctgggatttggtcgcttctctaggggttgggttgggaggagggagcccccaaggcagacccttccctctctacctcccgattcccagaccactgggcttggtcctcaaagattcctcacctccgcccttgcccaacctgggtcaaggctgcagaaggctggagccaccacaattagaggggaaggggctgctttgttccttatccctccttcttaaaaggtagggttcaaactaggcgggatgggggcccatactggtttgccccaggagtagggtttctgggctagggtctgtaaggctattttcctttgcggtgggaaggggaggtaggggatgaacactgggtatgggaagtgggtgagaaatggctgagagggaaggaggaaggggcctccccgctggagcagtcactggagtcatttagacaaaaacactcatgtgcataagatacacagtgcgcaaactcagccctgccagcccggccccaatcccacctctcaggactccttccaagaccctggaggaggttctggggatacagctgtagaaccgttcactctggccccatccaccccacctccagcctcttctccccttctaggtccagggagtaagaaggtgctcgggtgggcagacagtggtggaaacagtattgagttttcctttggttacatattgaaggcaaaggtgagctggacttacagtcaaaacggataggggtgaggaaggaagaggggccatggctggggttggagagggaggtaggccctcctcagcccctccaccccaagaaacacatctacgtggggtggcagtccctcagtcttttctctcccacgccccacagcaccaaacaaaaggagaagccccctcccccaggggctgctccccaccccaacctgggctgtacattcagtggttttcagcagtcctatggctcagggggccacggggcaggggaggtggcccgtcagtctcagtggacagtggcagtgacccgggtctgctggtccttcctgggacccacggtttgtgccattcgtttttctgaaggatagtatatgaccctaccagagccaccgcccaatcagaaatagctcccccaaaatcagaaactaaaaactggctctttccatctcaccctctgattcacacgtctgtttccctgtctcctatgtcgccctcgctctgtttcctttgctgggacctggggctgctcccagggtcctcgcttaaaataggccttttcacaaaagtgcttattacttgaagcaagtgctttagggctgcggtggggagaggggggagggggagggcaaagggaaggcgctgttccctccccgccctcccccatgaagactggggggcattctgcctgttttacttctccacacccgtttaagtcaaagaggtttaaaaaaaatcttaacattaaaataaatatgcagtggccatgagaatggtcaaaatgcttcaaaaaacactagggctggggagcccagggtggggcgtggggtttcctttggcataaggagaggaggctgcttgtcccccaggcttcctcacagccacatatggagggacagaggactccccaccacctcccagcactgctgacagtgcgctgagggcagcagggcgcagacagcccccagaaatctcatctagcaagacaacggggctctgacactcagacgcttcccgccatcaccaaacatcacgaaaggagaacacgactcacacccggcaagttctctctggaggacccatcttctcactccccttgccccccaccacctaattcccagcaccaagatgagagggagggggtggaatgggaagatttcaggagagagaattgaagggaaggcaagctttgcagagccagcagggttggggatgggggctgcagcccttaagagaggtcacattgattgtcatataggggaggacacggtgtggagggaggtgggcaagaggggcgtcacaaggccctttggctttgaaaataaaaataaaaactaaaagctgcacaatccttctcatcaataatggtcatttggaagccttgaaatgatttaggaactgagggttgggagaagcaaaacacagagagacaggggatcaaaagggaccatgaaaagataaggacttggacaacaccccaggcttctggaaaccagcatgaggtatggttaaaggtatccgttggggagggagggggtccctgggacgcccccctcccctcagcccacccttgacaagggtggcaagacattcagggtatacaactaaaagatgggtaagactgtgaataaagcaaacttgagtaggggagggaggctgaaggatcccccctcaggggagaccctgtactgtgtaaacgaagcctgtccagttctcaggggacaatactgatggcagccaaactgggcaaggatgcagtgtgggggcggagggggcatgacctctattcaagttctgtgtcttggcccctggctgaggtattgagtgtgaggaagggaacactgggctgcaggagtgggtccaactgtccaggaggctgcactaggagatgggtggacagagcacttaaagggaccagggccaaattcaatgctacatttagagagaaaactgccccctcttcactccagcccagtttggcttttggggtgcgactttagaaatcttatcagtgcagcccccagctcaatcccatctttcctccctgctgggaaggcagggaccaagccccagtacctattcatctctctctaggtcagagcttcttcctcacactggaggggaagcctgggtcccgagtagccacggtcccttgtcggccctgcccctcctaccatctttggcttcagatcaggagtgactggggcagtgggtactcttggacataacggaaggtggaggcagatagggagcacagataaactatgggcttggcggcacaggaggaagaacatggtccctccctccatatacatgcaaacacatgcctgaaacacagtggacatactagggctgtggttttgaaatgggcaggaaattaatttgtttcttcccctaaaggataaaacgcttacttaaaaattcatgacaagcctcaaagttcaagggaaggagagccagggcaggaatgaccacaggctctgccctcccaaaagaagataaaagaaagaagcaaggttaaagtgcgtggttaggggccaggctaggagtgggagggaatggggagggggcaggctgtgggggcagaaccagcccttgatttgcatatgaggagccaggggagagtgcaggattggggcccaggtacagtagttgctgcttcaagtgttttgcatttgaactttaggggtgatagggtacagaagtggggaaaaagctccaggccccagtgctaaatatcctcccccctcatcctctagctgcccctgaaggggggagggggacacccccagagtgctcacacagtaccagaaattaaggcttctcactgctgcggggatggagggaccggccgagcagggaggcagtgatgggtatggaagaagaggggatctgcctggcagtaggggcaggggagaagggggacacagagaggagtccccagggaagagtcgggggagctggcagcagaaagagggaaccaagagatggagtcaaagagtgggggagccaggcatttagcaatcattttgggacacttggcagaaggggtcgccctgggggtaccaagggcctggggtgctccctgtcagtcccagacccctgccaggccaagatggtgtggcaaaggggtgagcagctgctccccagggcttccttcccctccgccccctccacccagtcgtgttctcctttaaagtgccctaaatgtttagactttttctaaataaatagaattagatatcaagccaccggcgggggagggacactggagggggctactcagagtagcagccatctaacccaatggcgccgggccgctcctggctgtaggggcaggaggccccatggggcagggcgccgcagccacccaccgtcttggcggctgcaatgctgcagttcttgagcaggctgaagctgaaaggactgacggcgtccttgggtgggaaa

SEQ ID NO: 176 - protein, 540 aa, Homo sapiens
MMGSPVSHLLAGFCVWVVLGWVGGSVPNLGPAEQEQNHYLAQLFGLYGENGTLTAGGLARLLHSLGLGRVQGLRLGQHGPLTGRAASPAADNSTHRPQNPELSVDVWAGMPLGPSGWGDLEESKAPHLPRGPAPSGLDLLHRLLLLDHSLADHLNEDCLNGSQLLVNFGLSPAAPLTPRQFALLCPALLYQIDSRVCIGAPAPAPPGDLLSALLQSALAVLLLSLPSPLSLLLLRLLGPRLLRPLLGFLGALAVGTLCGDALLHLLPHAQEGRHAGPGGLPEKDLGPGLSVLGGLFLLFVLENMLGLLRHRGLRPRCCRRKRRNLETRNLDPENGSGMALQPLQAAPEPGAQGQREKNSQHPPALAPPGHQGHSHGHQGGTDITWMVLLGDGLHNLTDGLAIGAAFSDGFSSGLSTTLAVFCHELPHELGDFAMLLQSGLSFRRLLLLSLVSGALGLGGAVLGVGLSLGPVPLTPWVFGVTAGVFLYVALVDMLPALLRPPEPLPTPHVLLQGLGLLLGGGLMLAITLLEERLLPVTTEG

SEQ ID NO: 177 - DNA, 3600 bp, Homo sapiens
cccagactccagccctggaccgcgcatcccgagcccagcgcccagacagagtgtccccacaccctcctctgagacgccatgttcaactcgatgaccccaccaccaatcagtagctatggcgagccctgctgtctccggcccctccccagtcagggggcccccagtgtggggacagaaggactgtctggcccgcccttctgccaccaagctaacctcatgtccggcccccacagttatgggccagccagagagaccaacagctgcaccgagggcccactcttttcttctccccggagtgcagtcaagttgaccaagaagcgggcactgtccatctcacctctgtcggatgccagcctggacctgcagacggttatccgcacctcacccagctccctcgtagctttcatcaactcgcgatgcacatctccaggaggctcctacggtcatctctccattggcaccatgagcccatctctgggattcccagcccagatgaatcaccaaaaagggccctcgccttcctttggggtccagccttgtggtccccatgactctgcccggggtgggatgatcccacatcctcagtcccggggacccttcccaacttgccagctgaagtctgagctggacatgctggttggcaagtgccgggaggaacccttggaaggtgatatgtccagccccaactccacaggcatacaggatcccctgttggggatgctggatgggcgggaggacctcgagagagaggagaagcgtgagcctgaatctgtgtatgaaactgactgccgttgggatggctgcagccaggaatttgactcccaagagcagctggtgcaccacatcaacagcgagcacatccacggggagcggaaggagttcgtgtgccactgggggggctgctccagggagctgaggcccttcaaagcccagtacatgctggtggttcacatgcgcagacacactggcgagaagccacacaagtgcacgtttgaagggtgccggaagtcatactcacgcctcgaaaacctgaagacgcacctgcggtcacacacgggtgagaagccatacatgtgtgagcacgagggctgcagtaaagccttcagcaatgccagtgaccgagccaagcaccagaatcggacccattccaatgagaagccgtatgtatgtaagctccctggctgcaccaaacgctatacagatcctagctcgctgcgaaaacatgtcaagacagtgcatggtcctgacgcccatgtgaccaaacggcaccgtggggatggccccctgcctcgggcaccatccatttctacagtggagcccaagagggagcgggaaggaggtcccatcagggaggaaagcagactgactgtgccagagggtgccatgaagccacagccaagccctggggcccagtcatcctgcagcagtgaccactccccggcagggagtgcagccaatacagacagtggtgtggaaatgactggcaatgcagggggcagcactgaagacctctccagcttggacgagggaccttgcattgctggcactggtctgtccactcttcgccgccttgagaacctcaggctggaccagctacatcaactccggccaatagggacccggggtctcaaactgcccagcttgtcccacaccggtaccactgtgtcccgccgcgtgggccccccagtctctcttgaacgccgcagcagcagctccagcagcatcagctctgcctatactgtcagccgccgctcctccctggcctctcctttcccccctggctccccaccagagaatggagcatcctccctgcctggccttatgcctgcccagcactacctgcttcgggcaagatatgcttcagccagagggggtggtacttcgcccactgcagcatccagcctggatcggataggtggtcttcccatgcctccttggagaagccgagccgagtatccaggatacaaccccaatgcaggggtcacccggagggccagtgacccagcccaggctgctgaccgtcctgctccagctagagtccagaggttcaagagcctgggctgtgtccataccccacccactgtggcagggggaggacagaactttgatccttacctcccaacctctgtctactcaccacagccccccagcatcactgagaatgctgccatggatgctagagggctacaggaagagccagaagttgggacctccatggtgggcagtggtctgaacccctatatggacttcccacctactgatactctgggatatgggggacctgaaggggcagcagctgagccttatggagcgaggggtccaggctctctgcctcttgggcctggtccacccaccaactatggccccaacccctgtccccagcaggcctcatatcctgaccccacccaagaaacatggggtgagttcccttcccactctgggctgtacccaggccccaaggctctaggtggaacctacagccagtgtcctcgacttgaacattatggacaagtgcaagtcaagccagaacaggggtgcccagtggggtctgactccacaggactggcaccctgcctcaatgcccaccccagtgaggggcccccacatccacagcctctcttttcccattacccccagccctctcctccccaatatctccagtcaggcccctatacccagccaccccctgattatcttccttcagaacccaggccttgcctggactttgattcccccacccattccacagggcagctcaaggctcagcttgtgtgtaattatgttcaatctcaacaggagctactgtgggagggtgggggcagggaagatgcccccgcccaggaaccttcctaccagagtcccaagtttctggggggttcccaggttagcccaagccgtgctaaagctccagtgaacacatatggacctggctttggacccaacttgcccaatcacaagtcaggttcctatcccaccccttcaccatgccatgaaaattttgtagtgggggcaaatagggcttcacatagggcagcagcaccacctcgacttctgcccccattgcccacttgctatgggcctctcaaagtgggaggcacaaaccccagctgtggtcatcctgaggtgggcaggctaggagggggtcctgccttgtaccctcctcccgaaggacaggtatgtaaccccctggactctcttgatcttgacaacactcagctggactttgtggctattctggatgagccccaggggctgagtcctcctccttcccatgatcagcggggcagctctggacataccccacctccctctgggccccccaacatggctgtgggcaacatgagtgtcttactgagatccctacctggggaaacagaattcctcaactctagtgcctaaagagtagggaatctcatccatcacagatcgcatttcctaaggggtttctatccttccagaaaaattgggggagctgcagtcccctgcacaagatgccccagggatgggaggtatgggctgggggctatgtatagtctgtatacgttttgaggagaaatttgataatgacactgtttcctgataataaaggaactgcatcag

SEQ ID NO: 178 - protein, 1106 aa, Homo sapiens
MFNSMTPPPISSYGEPCCLRPLPSQGAPSVGTEGLSGPPFCHQANLMSGPHSYGPARETNSCTEGPLFSSPRSAVKLTKKRALSISPLSDASLDLQTVIRTSPSSLVAFINSRCTSPGGSYGHLSIGTMSPSLGFPAQMNHQKGPSPSFGVQPCGPHDSARGGMIPHPQSRGPFPTCQLKSELDMLVGKCREEPLEGDMSSPNSTGIQDPLLGMLDGREDLEREEKREPESVYETDCRWDGCSQEFDSQEQLVHHINSEHIHGERKEFVCHWGGCSRELRPFKAQYMLVVHMRRHTGEKPHKCTFEGCRKSYSRLENLKTHLRSHTGEKPYMCEHEGCSKAFSNASDRAKHQNRTHSNEKPYVCKLPGCTKRYTDPSSLRKHVKTVHGPDAHVTKRHRGDGPLPRAPSISTVEPKREREGGPIREESRLTVPEGAMKPQPSPGAQSSCSSDHSPAGSAANTDSGVEMTGNAGGSTEDLSSLDEGPCIAGTGLSTLRRLENLRLDQLHQLRPIGTRGLKLPSLSHTGTTVSRRVGPPVSLERRSSSSSSISSAYTVSRRSSLASPFPPGSPPENGASSLPGLMPAQHYLLRARYASARGGGTSPTAASSLDRIGGLPMPPWRSRAEYPGYNPNAGVTRRASDPAQAADRPAPARVQRFKSLGCVHTPPTVAGGGQNFDPYLPTSVYSPQPPSITENAAMDARGLQEEPEVGTSMVGSGLNPYMDFPPTDTLGYGGPEGAAAEPYGARGPGSLPLGPGPPTNYGPNPCPQQASYPDPTQETWGEFPSHSGLYPGPKALGGTYSQCPRLEHYGQVQVKPEQGCPVGSDSTGLAPCLNAHPSEGPPHPQPLFSHYPQPSPPQYLQSGPYTQPPPDYLPSEPRPCLDFDSPTHSTGQLKAQLVCNYVQSQQELLWEGGGREDAPAQEPSYQSPKFLGGSQVSPSRAKAPVNTYGPGFGPNLPNHKSGSYPTPSPCHENFVVGANRASHRAAAPPRLLPPLPTCYGPLKVGGTNPSCGHPEVGRLGGGPALYPPPEGQVCNPLDSLDLDNTQLDFVAILDEPQGLSPPPSHDQRGSSGHTPPPSGPPNMAVGNMSVLLRSLPGETEFLNSSA

SEQ ID NO: 179 - DNA, 4111 bp, Homo sapiens
acacaccacacacactcacactcacacacactcacacacactcatccccttgaatcttggggcaggaactcagaaaacttccagcccgggcagcgcgcgcttggtgcaagactcaggagctagcagcccgtccccctccgactctccggtgccgccgctgcctgctcccgccaccctaggaggcgcggtgccacccactactctgtcctctgcctgtgctccgtgcccgaccctatcccggcggagtctccccatcctcctttgctttccgactgcccaaggcactttcaatctcaatctcttctctctctctctctctctctctgtctctctctctctctctctctctctctctctcgcagggtggggggaagaggaggaggaattctttccccgcctaacatttcaagggacacaattcactccaagtctcttccctttccaagccgcttccgaagtgctcccggtgcccgcaactcctgatcccaacccgcgagaggagcctctgcgacctcaaagcctctcttccttctccctcgcttccctcctcctcttgctacctccacctccaccgccacctccacctccggcacccacccaccgccgccgccgccaccggcagcgcctcctcctctcctcctcctcctcccctcttctctttttggcagccgctggacgtccggtgttgatggtggcagcggcggcagcctaagcaacagcagccctcgcagcccgccagctcgcgctcgccccgccggcgtccccagccctatcacctcatctcccgaaaggtgctgggcagctccggggcggtcgaggcgaagcggctgcagcggcggtagcggcggcgggaggcaggatgagcgcacgcggtgagggcgcggggcagccgtccacttcagcccagggacaacctgccgccccagcgcctcagaagagaggacgcggccgccccaggaagcagcagcaagaaccaaccggtgagccctctcctaagagacccaggggaagacccaaaggcagcaaaaacaagagtccctctaaagcagctcaaaagaaagcagaagccactggagaaaaacggccaagaggcagacctaggaaatggccacaacaagttgttcagaagaagcctgctcaggaggaaactgaagagacatcctcacaagagtctgccgaagaggactagggggcgcaacgttcgatttctacctcagcagcagttggatcttttgaagggagaagacactgcagtgaccacttattctgtattgccatggtctttccactttcatctggggtggggtggggtggggtgggggaggggggggtggggtggggagaaatcacataaccttaaaaaggactatattaatcaccttctttgtaatcccttcacagtcccaggtttagtgaaaaactgctgtaaacacaggggacacagcttaacaatgcaacttttaattactgttttcttttttcttaacctactaatagtttgttgatctgataagcaagagtgggcgggtgagaaaaaccgaattgggtttagtcaatcactgcactgcatgcaaacaagaaacgtgtcacacttgtgacgtcgggcattcatataggaagaacgcggtgtgtaacactgtgtacacctcaaataccaccccaacccactccctgtagtgaatcctctgtttagaacaccaaagataaggactagatactactttctctttttcgtataatcttgtagacacttacttgatgatttttaactttttatttctaaatgagacgaaatgctgatgtatcctttcattcagctaacaaactagaaaaggttatgttcatttttcaaaaagggaagtaagcaaacaaatattgccaactcttctatttatggatatcacacatatcagcaggagtaataaatttactcacagcacttgttttcaggacaacacttcattttcaggaaatctacttcctacagagccaaaatgccatttagcaataaataacacttgtcagcctcagagcatttaaggaaactagacaagtaaaattatcctctttgtaatttaatgaaaaggtacaacagaataatgcatgatgaactcacctaattatgaggtgggaggagcgaaatctaaatttcttttgctatagttatacatcaatttaaaaagcaaaaaaaaaaaggggggggcaatctctctctgtgtctttctctctctctctccctctccctctctcttttcatgtgtatcagtttccatgaaagacctgaataccacttacctcaaattaagcatatgtgttacttcaagtaatacgttttgacataagatggttgaccaaggtgcttttcttcggcttgagttcaccatctcttcattcaaactgcacttttagccagagatgcaatatatccccactactcaatactacctctgaatgttacaacgaatttacagtctagtacttattacatgctgctatacacaagcaatgcaagaaaaaaacttactgggtaggtgattctaatcatctgcagttctttttgtacacttaattacagttaaagaagcaatctccttactgtgtttcagcatgactatgtatttttctatgtttttttaattaaaaatttttaaaatacttgtttcagcttctctgctagatttctacattaacttgaaaattttttaaccaagtcgctcctaggttcttaaggataattttcctcaatcacactacacatcacacaagatttgactgtaatatttaaatattaccctccaagtctgtacctcaaatgaattctttaaggagatggactaattgacttgcaaagacctacctccagacttcaaaaggaatgaacttgttacttgcagcattcatttgttttttcaatgtttgaaatagttcaaactgcagctaaccctagtcaaaactatttttgtaaaagacatttgatagaaaggaacacgtttttacatacttttgcaaaataagtaaataataaataaaataaagccaaccttcaaagaacttgaagctttgtaggtgagatgcaacaagccctgcttttgcataatgcaatcaaaaatatgtgtttttaagattagttgaatataagaaaatgcttgacaaatattttcatgtattttacacaaatgtgatttttgtaatatgtctcaaccagatttattttaaacgcttcttatgtagagtttttatgcctttctctcctagtgagtgtgctgactttttaacatggtattatcaactgggccaggaggtagtttctcatgacggcttttgtcagtatggcttttagtactgaagccaaatgaaactcaaaaccatctctcttccagctgcttcagggaggtagtttcaaaggccacatacctctctgagactggcagatcgctcactgttgtgaatcaccaaaggagctatggagagaattaaaactcaacattactgttaactgtgcgttaaataagcaaataaacagtggctcataaaaataaaagtcgcattccatatctttggatgggccttttagaaacctcattggccagctcataaaatggaagcaattgctcatgttggccaaacatggtgcaccgagtgatttccatctctggtaaagttacacttttatttcctgtatgttgtacaatcaaaacacactactacctcttaagtcccagtatacctcatttttcatactgaaaaaaaaagcttgtggccaatggaacagtaagaacatcataaaatttttatatatatagtttatttttgtgggagataaattttataggactgttctttgctgttgttggtcgcagctacataagactggacatttaacttttctaccatttctgcaagttaggtatgtttgcaggagaaaagtatcaagacgtttaactgcagttgactttctccctgttcctttgagtgtcttctaactttattctttgttctttatgtagaattgctgtctatgattgtactttgaatcgcttgcttgttgaaaatatttctctagtgtattatcactgtctgttctgcacaataaacataacagcctctgtga

SEQ ID NO: 180 - protein, 109 aa, Homo sapiens
MSARGEGAGQPSTSAQGQPAAPAPQKRGRGRPRKQQQEPTGEPSPKRPRGRPKGSKNKSPSKAAQKKAEATGEKRPRGRPRKWPQQVVQKKPAQEETEETSSQESAEED

SEQ ID NO: 181 - DNA, 3252 bp, Homo sapiens
gcggcccaggcccggaaccttccctggtcgtgcgccctatgtaaggccagccgcggcaggaccaaggcggcggtgtcagctcgcgagcctaccctccgcggacggtcttgggtcgcctgctgcctggcttgcctggtcggcggcgggtgccccgcgcgcacgcgcaaagcccgccgcgttccccgaccccaggccgcgctctgtgggcctctgagggcggcatgcgggactacgacgaggtgaccgccttcctgggcgagtgggggcccttccagcgcctcatcttcttcctgctcagcgccagcatcatccccaatggcttcaccggcctgtcctccgtgttcctgatagcgaccccggagcaccgctgccgggtgccggacgccgcgaacctgagcagcgcctggcgcaaccacactgtcccactgcggctgcgggacggccgcgaggtgccccacagctgccgccgctaccggctcgccaccatcgccaacttctcggcgctcgggctggagccggggcgcgacgtggacctggggcagctggagcaggagagctgtctggatggctgggagttcagtcaggacgtctacctgtccaccattgtgaccgagtggaacctggtgtgtgaggacgactggaaggccccactcacaatctccttgttcttcgtgggtgtgctgttgggctccttcatttcagggcagctgtcagacaggtttggccggaagaatgtgctgttcgtgaccatgggcatgcagacaggcttcagcttcctgcagatcttctcgaagaattttgagatgtttgtcgtgctgtttgtccttgtaggcatgggccagatctccaactatgtggcagcatttgtcctggggacagaaattcttggcaagtcagttcgtataatattctctacgttaggagtgtgcatattttatgcatttggctacatggtgctgccactgtttgcttacttcatccgagactggcggatgctgctggtggcgctgacgatgccgggggtgctgtgcgtggcactctggtggttcatccctgagtccccccgatggctcatctctcagggacgatttgaagaggcagaggtgatcatccgcaaggctgccaaagccaatgggattgttgtgccttccactatctttgacccgagtgagttacaagacctaagttccaagaagcaacagtcccacaacattctggatctgcttcgaacctggaatatccggatggtcaccatcatgtccataatgctgtggatgaccatatcagtgggctattttgggctttcgcttgatactcctaacttgcatggggacatctttgtgaactgcttcctttcagcgatggttgaagtcccagcatatgtgttggcctggctgctgctgcaatatttgccccggcgctattccatggccactgccctcttcctgggtggcagtgtccttctcttcatgcagctggtacccccagacttgtattatttggctacagtcctggtgatggtgggcaagtttggagtcacggctgccttttccatggtctacgtgtacacagccgagctgtatcccacagtggtgagaaacatgggtgtgggagtcagctccacagcatcccgcctgggcagcatcctgtctccctacttcgtttaccttggtgcctacgaccgcttcctgccctacattctcatgggaagtctgaccatcctgacagccatcctcaccttgtttctcccagagagcttcggtaccccactcccagacaccattgaccagatgctaagagtcaaaggaatgaaacacagaaaaactccaagtcacacaaggatgttaaaagatggtcaagaaaggcccacaatccttaaaagcacagccttctaacatcgcttccagtaagggagaaactgaagaggaaagactgtcttgctagaaatggccagcttgtgcagactccgagtccttcagtgacaaaggcctttgctgtttgtcctcttgacctgtgtctgacttgctcctggatgggcacccacactcagaggctacatatggccctagagcaccaccttcctctagggacactggggctacctacagacaacttcatctaagtcctaactattacaatgatggactcagcacctccaaagcagttaatttttcactagaaccagtgagatctggaggaatgtgagaagcatatgctaaatgtacattttaattttagactacttgaaaaggcccctaataaggctagaggtctaagtcccccacccctttccccactcccctctagtggtgaactttagaggaaaaggaagtaattgcacaaggagtttgattcttaccttttctcagttacagaggacattaactggatcattgcttccccagggcaggagagcgcagagctagggaaagtgaaaggtaatgaagatggagcagaatgagcagatgcagatcaccagcaaagtgcactgatgtgtgagctcttaagaccactcagcatgacgactgagtagacttgtttacatctgatcaaagcactgggcttgtccaggctcataataaatgctccattgaatctactattcttgttttccactgctgtggaaacctccttgctactatagcgtcttatgtatggtttaaaggaaatttatcaggtgagagagatgagcaacgttgtcttttctctcaaagctgtaatgtgggttttgttttactgtttatttgtttgttgttgtatccttttctccttgttatttgcccttcagaatgcacttgggaaaggctggttccttagcctcctggtttgtgtctttttttttttttttttaaacacagaatcactctggcaattgtctgcagctgccactggtgcaaggccttaccagccctagcctctagcacttctctaagtgccaaaaacagtgtcattgtgtgtgttcctttcttgatacttagtcatgggaggatattacaaaaaagaaatttaaattgtgttcatagtctttcagagtagctcactttagtcctgtaactttattgggtgatattttgtgttcagtgtaattgtcttctctttgctgattatgttaccatggtactcctaaagcatatgcctcacctggttaaaaaagaacaaacatgtttttgtgaaagctactgaagtgccttgggaaatgagaaagttttaataagtaaaatgattttttaaatatcaaaaaaaaaaaaaaaa

SEQ ID NO: 182 - protein, 557 aa, Homo sapiens
MRDYDEVTAFLGEWGPFQRLIFFLLSASIIPNGFTGLSSVFLIATPEHRCRVPDAANLSSAWRNHTVPLRLRDGREVPHSCRRYRLATIANFSALGLEPGRDVDLGQLEQESCLDGWEFSQDVYLSTIVTEWNLVCEDDWKAPLTISLFFVGVLLGSFISGQLSDRFGRKNVLFVTMGMQTGFSFLQIFSKNFEMFVVLFVLVGMGQISNYVAAFVLGTEILGKSVRIIFSTLGVCIFYAFGYMVLPLFAYFIRDWRMLLVALTMPGVLCVALWWFIPESPRWLISQGRFEEAEVIIRKAAKANGIVVPSTIFDPSELQDLSSKKQQSHNILDLLRTWNIRMVTIMSIMLWMTISVGYFGLSLDTPNLHGDIFVNCFLSAMVEVPAYVLAWLLLQYLPRRYSMATALFLGGSVLLFMQLVPPDLYYLATVLVMVGKFGVTAAFSMVYVYTAELYPTVVRNMGVGVSSTASRLGSILSPYFVYLGAYDRFLPYILMGSLTILTAILTLFLPESFGTPLPDTIDQMLRVKGMKHRKTPSHTRMLKDGQERPTILKSTAF

SEQ ID NO: 183 - DNA, 2135 bp, Homo sapiens
ccccggcttcgcgccccaatttctaacagcctgcctgtcccccgggaacgttctaacatccttggggagcgccccagctacaagacactgtcctgagaacgctgtcatcacccgtagttgcaagtttcggagcggcagtgggaagcatgcgggactacgacgaggtgatcgccttcctgggcgagtgggggcccttccagcgcctcatcttcttcctgctcagcgccagcatcatccccaatggcttcaatggtatgtcagtcgtgttcctggcggggaccccggagcaccgctgtcgagtgccggacgccgcgaacctgagcagcgcctggcgcaacaacagtgtcccgctgcggctgcgggacggccgcgaggtgccccacagctgcagccgctaccggctcgccaccatcgccaacttctcggcgctcgggctggagccggggcgcgacgtggacctggggcagctggagcaggagagctgcctggatggctgggagttcagccaggacgtctacctgtccaccgtcgtgaccgagtggaatctggtgtgtgaggacaactggaaggtgcccctcaccacctccctgttcttcgtaggcgtgctcctcggctccttcgtgtccgggcagctgtcagacaggtttggcaggaagaacgttctcttcgcaaccatggctgtacagactggcttcagcttcctgcagattttctccatcagctgggagatgttcactgtgttatttgtcatcgtgggcatgggccagatctccaactatgtggtagccttcatactaggaacagaaattcttggcaagtcagttcgtattatattctctacattaggagtgtgcacattttttgcagttggctatatgctgctgccactgtttgcttacttcatcagagactggcggatgctgctgctggcgctgacggtgccgggagtgctgtgtgtcccgctgtggtggttcattcctgaatctccccgatggctgatatcccagagaagatttagagaggctgaagatatcatccaaaaagctgcaaaaatgaacaacacagctgtaccagcagtgatatttgattctgtggaggagctaaatcccctgaagcagcagaaagctttcattctggacctgttcaggactcggaatattgccataatgaccattatgtctttgctgctatggatgctgacctcagtgggttactttgctctgtctctggatgctcctaatttacatggagatgcctacctgaactgtttcctctctgccttgattgaaattccagcttacattacagcctggctgctattgcgaacgctgcccaggcgttatatcatagctgcagtactgttctggggaggaggtgtgcttctcttcattcaactggtacctgtggattattacttcttatccattggtctggtcatgctgggaaaatttgggatcacctctgctttctccatgctgtatgtcttcactgctgagctctacccaaccctggtcaggaacatggcggtgggggtcacatccacggcctccagagtgggcagcatcattgccccctactttgtttacctcggtgcttacaacagaatgctgccctacatcgtcatgggtagtctgactgtcctgattggaatcttcaccctttttttccctgaaagtttgggaatgactcttccagaaaccttagagcagatgcagaaagtgaaatggttcagatctgggaaaaaaacaagagactcaatggagacagaagaaaatcccaaggttctaataactgcattctgaaaaaatatctaccccatttggtgaagtgaaaaacagaaaaataagaccctgtggagaaattcgttgttcccactgaaatggactgactgtaacgattgacaccaaaatgaaccttgctatcaagaaatgctcgtcatacagtaaactctggatgattcttccagataatgtccttgctttacaaaccaaccatttctagagagtctccttactcattaattcaatgaaatggattggtaagatgtcttgaaaacatgttagtcaaggactggtaaaatacatataaagattaacactcatttccaatcatacaaatactatccaaataaaaat

SEQ ID NO: 184 - protein, 551 aa, Homo sapiens
MRDYDEVIAFLGEWGPFQRLIFFLLSASIIPNGFNGMSVVFLAGTPEHRCRVPDAANLSSAWRNNSVPLRLRDGREVPHSCSRYRLATIANFSALGLEPGRDVDLGQLEQESCLDGWEFSQDVYLSTVVTEWNLVCEDNWKVPLTTSLFFVGVLLGSFVSGQLSDRFGRKNVLFATMAVQTGFSFLQIFSISWEMFTVLFVIVGMGQISNYVVAFILGTEILGKSVRIIFSTLGVCTFFAVGYMLLPLFAYFIRDWRMLLLALTVPGVLCVPLWWFIPESPRWLISQRRFREAEDIIQKAAKMNNTAVPAVIFDSVEELNPLKQQKAFILDLFRTRNIAIMTIMSLLLWMLTSVGYFALSLDAPNLHGDAYLNCFLSALIEIPAYITAWLLLRTLPRRYIIAAVLFWGGGVLLFIQLVPVDYYFLSIGLVMLGKFGITSAFSMLYVFTAELYPTLVRNMAVGVTSTASRVGSIIAPYFVYLGAYNRMLPYIVMGSLTVLIGIFTLFFPESLGMTLPETLEQMQKVKWFRSGKKTRDSMETEENPKVLITAF

SEQ ID NO: 185 - DNA, 2168 bp, Homo sapiens
gcgagtgtccagctgcggagacccgtgataattcgttaactaattcaacaaacgggacccttctgtgtgccagaaaccgcaagcagttgctaacccagtgggacaggcggattggaagagcgggaaggtcctggcccagagcagtgtgacacttccctctgtgaccatgaaactctgggtgtctgcattgctgatggcctggtttggtgtcctgagctgtgtgcaggccgaattcttcacctctattgggcacatgactgacctgatttatgcagagaaagagctggtgcagtctctgaaagagtacatccttgtggaggaagccaagctttccaagattaagagctgggccaacaaaatggaagccttgactagcaagtcagctgctgatgctgagggctacctggctcaccctgtgaatgcctacaaactggtgaagcggctaaacacagactggcctgcgctggaggaccttgtcctgcaggactcagctgcaggttttatcgccaacctctctgtgcagcggcagttcttccccactgatgaggacgagataggagctgccaaagccctgatgagacttcaggacacatacaggctggacccaggcacaatttccagaggggaacttccaggaaccaagtaccaggcaatgctgagtgtggatgactgctttgggatgggccgctcggcctacaatgaaggggactattatcatacggtgttgtggatggagcaggtgctaaagcagcttgatgccggggaggaggccaccacaaccaagtcacaggtgctggactacctcagctatgctgtcttccagttgggtgatctgcaccgtgccctggagctcacccgccgcctgctctcccttgacccaagccacgaacgagctggagggaatctgcggtactttgagcagttattggaggaagagagagaaaaaacgttaacaaatcagacagaagctgagctagcaaccccagaaggcatctatgagaggcctgtggactacctgcctgagagggatgtttacgagagcctctgtcgtggggagggtgtcaaactgacaccccgtagacagaagaggcttttctgtaggtaccaccatggcaacagggccccacagctgctcattgcccccttcaaagaggaggacgagtgggacagcccgcacatcgtcaggtactacgatgtcatgtctgatgaggaaatcgagaggatcaaggagatcgcaaaacctaaacttgcacgagccaccgttcgtgatcccaagacaggagtcctcactgtcgccagctaccgggtttccaaaagctcctggctagaggaagatgatgaccctgttgtggcccgagtaaatcgtcggatgcagcatatcacagggttaacagtaaagactgcagaattgttacaggttgcaaattatggagtgggaggacagtatgaaccgcacttcgacttctctaggcgaccttttgacagcggcctcaaaacagaggggaataggttagcgacgtttcttaactacatgagtgatgtagaagctggtggtgccaccgtcttccctgatctgggggctgcaatttggcctaagaagggtacagctgtgttctggtacaacctcttgcggagcggggaaggtgactaccgaacaagacatgctgcctgccctgtgcttgtgggctgcaagtgggtctccaataagtggttccatgaacgaggacaggagttcttgagaccttgtggatcaacagaagttgactgacatccttttctgtccttccccttcctggtccttcagcccatgtcaacgtgacagacacctttgtatgttcctttgtatgttcctatcaggctgatttttggagaaatgaatgtttgtctggagcagagggagaccatactagggcgactcctgtgtgactgaagtcccagcccttccattcagcctgtgccatccctggccccaaggctaggatcaaagtggctgcagcagagttagctgtctagcgcctagcaaggtgcctttgtacctcaggtgttttaggtgtgagatgtttcagtgaaccaaagttctgataccttgtttacatgtttgtttttatggcatttctatctattgtggctttaccaaaaaataaaatgtccctaccagaaaaaaaaaa

SEQ ID NO: 186 - protein, 533 aa, Homo sapiens
MKLWVSALLMAWFGVLSCVQAEFFTSIGHMTDLIYAEKELVQSLKEYILVEEAKLSKIKSWANKMEALTSKSAADAEGYLAHPVNAYKLVKRLNTDWPALEDLVLQDSAAGFIANLSVQRQFFPTDEDEIGAAKALMRLQDTYRLDPGTISRGELPGTKYQAMLSVDDCFGMGRSAYNEGDYYHTVLWMEQVLKQLDAGEEATTTKSQVLDYLSYAVFQLGDLHRALELTRRLLSLDPSHERAGGNLRYFEQLLEEEREKTLTNQTEAELATPEGIYERPVDYLPERDVYESLCRGEGVKLTPRRQKRLFCRYHHGNRAPQLLIAPFKEEDEWDSPHIVRYYDVMSDEEIERIKEIAKPKLARATVRDPKTGVLTVASYRVSKSSWLEEDDDPVVARVNRRMQHITGLTVKTAELLQVANYGVGGQYEPHFDFSRRPFDSGLKTEGNRLATFLNYMSDVEAGGATVFPDLGAAIWPKKGTAVFWYNLLRSGEGDYRTRHAACPVLVGCKWVSNKWFHERGQEFLRPCGSTEVD

SEQ ID NO: 187 - DNA, 735 bp, Homo sapiens
gcagccagaaagctctggagcatcagggagactccaacttaaggcaacagcatgggtgaataagggcttcctgtggactggcaatgagaggcaaaacctggtgcttgagcactggcccctaaggcaggccttacagatctcttacactcgtggtgggaagagtttagtgtgaaactggggtggaattgggtgtccacgtatgttcccttttgccttactatatgttctgtcagtttctttcaggaaaatcttcatcttacaacttgtagggctggtgttaacttacgacttcactaactgtgactttgagaagattaaagcagcctatctcagtactatttctaaagacctgattacatatatgagtgggaccaaaagtaccgagttcaacaacaccgtctcttgtagcaatcggccacattgccttactgaaatccagagcctaaccttcaatcccaccgccggctgcgcgtcgctcgccaaagaaatgttcgccatgaaaactaaggctgccttagctatctggtgcccaggctattcggaaactcagataaatgctactcaggcaatgaagaagaggagaaaaaggaaagtcacaaccaataaatgtctggaacaagtgtcacaattacaaggattgtggcgtcgcttcaatcgacctttactgaaacaacagtaaaccatctttattatggtcatatttcacagcaccaaaataaatcatctttattaagt

SEQ ID NO: 188 - protein, 159 aa, Homo sapiens
MFPFALLYVLSVSFRKIFILQLVGLVLTYDFTNCDFEKIKAAYLSTISKDLITYMSGTKSTEFNNTVSCSNRPHCLTEIQSLTFNPTAGCASLAKEMFAMKTKAALAIWCPGYSETQINATQAMKKRRKRKVTTNKCLEQVSQLQGLWRRFNRPLLKQQ

SEQ ID NO: 189 - DNA, 1677 bp, Homo sapiens
aggttctcttacatcgaccgcctaagagtcgcgctgtaagaagcaacaacctctcctcttcgtctccgccatcagctcggcagtcgcgaagcagcaaccatgcgtgagtgcatctccatccacgttggccaggctggtgtccagattggcaatgcctgctgggagctctactgcctggaacacggcatccagcccgatggccagatgccaagtgacaagaccattgggggaggagatgattccttcaacaccttcttcagtgagacgggggctggcaagcatgtgccccgggcagtgtttgtagacttggaacccacagtcattgatgaagttcgcactggcacctaccgccagctcttccaccctgagcaacttatcacaggcaaagaagatgctgccaataactatgcccgagggcactacaccattggcaaggagatcattgacctcgtgttggaccgaattcgcaagctggccgaccagtgcacgggtctccagggcttcttggttttccacagctttggtgggggaactggttctgggttcacctcgctgctcatggaacgtctctcagttgattatggcaagaagtccaagctggagttctctatttacccggcgccccaggtttccacagctgtagttgagccctacaactccatcctcaccacccacaccaccctggagcactctgattgtgccttcatggtagacaatgaggccatctatgacatctgtcgtagaaacctcgatattgagcgtccaacctatactaacctgaataggttaataggtcaaattgtgtcctccatcactgcttccctgagatttgatggagccctgaatgttgacctgacagaattccagaccaacctggtgccctatccccgcatccacttccctctggccacatatgcccctgtcatctctgctgagaaagcctaccatgaacagctttctgtagcagagatcaccaatgcttgctttgagccagccaaccagatggtgaaatgtgaccctcgccatggtaaatacatggcttgctgcctgttgtaccgtggtgacgtggttcccaaagatgtcaatgctgccattgccaccatcaagaccaagcgtaccatccagtttgtggattggtgccccactggcttcaaggttggcatcaactaccagcctcccactgtggtgcctggtggagacctggccaaggtacagagagctgtgtgcatgctgagcaacaccacagccattgctgaggcctgggctcgcctggaccacaagtttgacctgatgtatgccaaacgtgcctttgttcactggtacgttggggaggggatggaggaaggtgagttttcagaggcccgtgaggacatggctgcccttgagaaggattatgaggaggttggtgtggattctgttgaaggagagggtgaggaagaaggagaggaatactaaagttaaaacgtcacaaaggtgctgcttttacagggaagcttattctgttttaaacattgaaaagttgtggtctgatcagttaatttgtatgtagcagtgtatgctctcatatacaattactgacctatgctctaaaacatgaatgctttgttacagacccaagctgtccatttctgtgatgggttttgaataaagtattccctgtcttaaaaaaaaaaaaaa

SEQ ID NO: 190 - protein, 451 aa, Homo sapiens
MRECISIHVGQAGVQIGNACWELYCLEHGIQPDGQMPSDKTIGGGDDSFNTFFSETGAGKHVPRAVFVDLEPTVIDEVRTGTYRQLFHPEQLITGKEDAANNYARGHYTIGKEIIDLVLDRIRKLADQCTGLQGFLVFHSFGGGTGSGFTSLLMERLSVDYGKKSKLEFSIYPAPQVSTAVVEPYNSILTTHTTLEHSDCAFMVDNEAIYDICRRNLDIERPTYTNLNRLIGQIVSSITASLRFDGALNVDLTEFQTNLVPYPRIHFPLATYAPVISAEKAYHEQLSVAEITNACFEPANQMVKCDPRHGKYMACCLLYRGDVVPKDVNAAIATIKTKRTIQFVDWCPTGFKVGINYQPPTVVPGGDLAKVQRAVCMLSNTTAIAEAWARLDHKFDLMYAKRAFVHWYVGEGMEEGEFSEAREDMAALEKDYEEVGVDSVEGEGEEEGEEY

SEQ ID NO: 191 - DNA, 1558 bp, Homo sapiens
cttggtagtctgttagtgggagatccttgttgccgtcccttcgcctccttcaccgccgcagaccccttcaagttctagtcatgcgtgagtgcatctccatccacgttggccaggctggtgtccagattggcaatgcctgctgggagctctactgcctggaacacggcatccagcccgatggccagatgccaagtgacaagaccattgggggaggagatgattccttcaacaccttcttcagtgaaacgggtgctggcaagcatgtgccccgggcagtgtttgtagacttggaacccacagtcattgatgaagttcgcactggcacctaccgccagctcttccaccctgagcagctcatcacaggcaaggaagatgctgccaataactatgcccgagggcactacaccattggcaaggagatcattgacctcgtgttggaccgaattcgcaagctggctgaccagtgcaccggtcttcagggcttcttggttttccacagctttggtgggggaactggttctgggttcacctcgctgctcatggaacgtctctcagttgattatggcaagaagtccaagctggagttctctatttacccggcgccccaggtttccacagctgtagttgagccctacaactccatcctcaccacccacaccaccctggagcactctgattgtgccttcatggtagacaatgaggccatctatgacatctgtcgtagaaacctcgatatcgagcgcccaacctacactaaccttaaccgccttattagccagattgtgtcctccatcactgcttccctgagatttgatggagccctgaatgttgacctgacagaattccagaccaacctggtgccctacccccgcatccacttccctctggccacatatgcccctgtcatctctgctgagaaagcctaccatgaacagcttactgtagcagagatcaccaatgcttgctttgagccagccaaccagatggtgaaatgtgaccctcgccatggtaaatacatggcttgctgcctgttataccgtggtgacgtggttcccaaagatgtcaatgctgccattgccaccatcaaaaccaagcgtaccatccagtttgtggattggtgccccactggcttcaaggttggcattaattaccagcctcccactgtggtgcctggcggagacctggccaaggtacagagagctgtgtgcatgctgagcaataccacagctgttgctgaggcctgggctcgcctggaccacaagtttgacctgatgtatgccaagcgtgcctttgttcactggtacgtgggtgaggggatggaggaaggcgagttttcagaggcccgtgaggacatggctgcccttgagaaggattatgaggaggttggagcagatagtgctgacggagaggatgagggtgaagagtattaacctgtgtgctgtacttttacactcctttgtcttggaactgtcttatttttgttctgtaaatgtctattgccgtaaattgttaataaaattgatgtttccattttaaaaaaaaaaaaaaaaaaaaaaaa

SEQ ID NO: 192 - protein, 449 aa, Homo sapiens
MRECISIHVGQAGVQIGNACWELYCLEHGIQPDGQMPSDKTIGGGDDSFNTFFSETGAGKHVPRAVFVDLEPTVIDEVRTGTYRQLFHPEQLITGKEDAANNYARGHYTIGKEIIDLVLDRIRKLADQCTGLQGFLVFHSFGGGTGSGFTSLLMERLSVDYGKKSKLEFSIYPAPQVSTAVVEPYNSILTTHTTLEHSDCAFMVDNEAIYDICRRNLDIERPTYTNLNRLISQIVSSITASLRFDGALNVDLTEFQTNLVPYPRIHFPLATYAPVISAEKAYHEQLTVAEITNACFEPANQMVKCDPRHGKYMACCLLYRGDVVPKDVNAAIATIKTKRTIQFVDWCPTGFKVGINYQPPTVVPGGDLAKVQRAVCMLSNTTAVAEAWARLDHKFDLMYAKRAFVHWYVGEGMEEGEFSEAREDMAALEKDYEEVGADSADGEDEGEEY

SEQ ID NO: 193 - DNA, 1143 bp, Homo sapiens
gaatgtctctctaccccccaaccccccatgtctgtggtgaagtcgatcgaattagtgctgcccgaggatagaatctacctggctggctccagcataaaagggcaggtgatcttaaccctgaacagcaccctggtggaccccatagtgaaggtggagctcgtgggaaggggttacgtcgaatggagtgaagaagccggggcatcctgtgattatagcagaaatgttatttgcaacaacaaggcagactacgtgcataagacaaagacattcccagtggaggataattggttaagtgcaggcagccacacctttgacttccatttcaacttacctcccaggcttccttctaccttcaccagcaaatttggccatgtcttctatttcgtacaagcttcctgcatgggcagggaacacattttagccaagaagaggatgtacttattggttcaaggaacttccaccttccacaaagaaaccccattccaggtaccgatgggggaaaggtggaggtgggaacaatctccaagctccaaggaggaagagggaaggagaggagggggagctccagctgctcctgaaaaggctgaagagaagccagaggcagaaaagtgggagaaccccttgttcgtggaggctgaggagaaagtctcctacaactgctgccgccagggcactgtctgtttgcaaatccagatggaaaggaacaccttcacgccaggagagaaggtcgtcttcacaacagagatcaacaaccagaccagcaaatgcatcaagacggtcgtattcgccctgtatgcccacatacagtacgagggcttcacgcccagtgcagagcggcggtctcggctggacagcagcgagcttctgaggcaggaggccaacacccccgtgacccgcttcaacaccaccaaggttgtcagcaccttcaacctgccgttgctgctgtccgtgagcagcagcacgcaggacggtgagatcatgcacactcgctacgagctggtcaccaccgtgcacctgccctggtccctgaccagcctcaaggccaaagttcccatcatcatcaccagcgcctcagtggactctgccatctgccagctgtcagaggacggagtgttacccgtgaacccagatcaccagaattaa

SEQ ID NO: 194 - protein, 342 aa, Homo sapiens
MGDREECLSTPQPPMSVVKSIELVLPEDRIYLAGSSIKGQVILTLNSTLVDPIVKVELVGRGYVEWSEEAGASCDYSRNVICNNKADYVHKTKTFPVEDNWLSAGSHTFDFHFNLPPRLPSTFTSKFGHVFYFVQASCMGREHILAKKRMYLLVQGTSTFHKETPFQNPLFVEAEEKVSYNCCRQGTVCLQIQMERNTFTPGEKVVFTTEINNQTSKCIKTVVFALYAHIQYEGFTPSAERRSRLDSSELLRQEANTPVTRFNTTKVVSTFNLPLLLSVSSSTQDGEIMHTRYELVTTVHLPWSLTSLKAKVPIIITSASVDSAICQLSEDGVLPVNPDHQN

SEQ ID NO: 195 - DNA, 1068 bp, Homo sapiens
atggatttcatctttcatgagaaacaggaaggtttcctgtgtgctcagcactgtctgaacaatctattgcaaggagaatattttagccctgtggaattagcctcaattgcacatcagctagatgaagaagagaggatgagaatggcagaaggaggagtcaccagtgaagagtatcttgcatttttacagcagccttcagaaaacatggatgataccggtttcttctccattcaggtaataagcaatgccttgaagttctggggtttagagatcatccatttcaataatcctgaatatcagaagctcggcattgatcctataaatgaaagatcttttatatgtaattataaacaacactggtttactattagaaaatttggaaaacactggtttaacttgaattctctcttggcgggtccagaattaatatcagatacatgccttgcaaatttcttggctcgattacaacaacaagcatattctgtatttgttgtcaagggtgatctgccagactgtgaagctgaccaactcctgcagatcatcagtgtcgaagagatggatacaccaaaacttaatggaaaaaaattagtaaaacaaaaagagcatagagtctataaaacagtccttgaaaaagtatcagaagaaagtgatgagtctggaacatcagaccaagatgaggaggattttcagagggcccttgaactaagccgccaagaaaccaatagagaagatgaacatctccgcagtactattgagttaagcatgcaaggtagttccggaaacacatcgcaagatcttccaaagacatcatgtgtaactcctgcttcagaacagccgaagaaaataaaagaagactattttgaaaagcatcagcaggaacagaagcagcagcaacaacagtcagatctgccgggccacagttcatacctacacgaaaggccaacaacaagttcgagagcaattgagagtgatctcagtgatgacatcagtgaaggcacagtacaggccgctgtcgacaccattttagaaattatgagaaagaatttgaaaatcaaaggggaaaaataa

SEQ ID NO: 196 - DNA, 2393 bp, Homo sapiens
cgctgagatctgtggaggtttttctctgcaaatgcagaaagaaatcaggtggatggatgcataattatggccctgctcctggtctctttgctggcattcctgagcttgggctcaggatgtcatcatcggatctgtcactgctctaacagggtttttctctgccaagagagcaaggtgacagagattccttctgacctcccgaggaatgccattgaactgaggtttgtcctcaccaagcttcgagtcatccaaaaaggtgcattttcaggatttggggacctggagaaaatagagatctctcagaatgatgtcttggaggtgatagaggcagatgtgttctccaaccttcccaaattacatgaaattagaattgaaaaggccaacaacctgctctacatcacccctgaggccttccagaaccttcccaaccttcaatatctgttaatatccaacacaggtattaagcaccttccagatgttcacaagattcattctctccaaaaggttttacttgacattcaagataacataaacatccacacaattgaaagaaattctttcgtggggctgagctttgaaagtgtgattctatggctgaataagaatgggattcaagaaatacacaactgtgcattcaatggaacccaactagatgcagtgaatctaagcgataataataatttagaagaattgcctaatgatgttttccacggagcctctggaccagtcattctagatatttcaagaacaaggatccattccctgcctagctatggcttagaaaatcttaagaagctgagggccaggtcgacttacaacttaaaaaagctgcctactctggaaaagcttgtcgccctcatggaagccagcctcacctatcccagccattgctgtgcctttgcaaactggagacggcaaatctctgagcttcatccaatttgcaacaaatctattttaaggcaagaagttgattatatgactcaggctaggggtcagagatcctctctggcagaagacaatgagtccagctacagcagaggatttgacatgacgtacactgagtttgactatgacttatgcaatgaagtggttgacgtgacctgctcccctaagccagatgcattcaacccatgtgaagatatcatggggtacaacatcctcagagtcctgatatggtttatcagcatcctggccatcactgggaacatcatagtgctagtgatcctaactaccagccaatataaactcacagtccccaggttccttatgtgcaacctggcctttgctgatctctgcattggaatctacctgctgctcattgcatcagttgatatccataccaagagccaatatcacaactatgccattgactggcaaactggggcaggctgtgatgctgctggctttttcactgtctttgccagtgagctgtcagtctacactctgacagctatcaccttggaaagatggcataccatcacgcatgccatgcagctggactgcaaggtgcagctccgccatgctgccagtgtcatggtgatgggctggatttttgcttttgcagctgccctctttcccatctttggcatcagcagctacatgaaggtgagcatctgcctgcccatggatattgacagccctttgtcacagctgtatgtcatgtccctccttgtgctcaatgtcctggcctttgtggtcatctgtggctgctatatccacatctacctcacagtgcggaaccccaacatcgtgtcctcctctagtgacaccaggatcgccaagcgcatggccatgctcatcttcactgacttcctctgcatggcacccatttctttctttgccatttctgcctccctcaaggtgcccctcatcactgtgtccaaagcaaagattctgctggttctgtttcaccccatcaactcctgtgccaaccccttcctctatgccatctttaccaaaaactttcgcagagatttcttcattctgctgagcaagtgtggctgctatgaaatgcaagcccaaatttataggacagaaacttcatccactgtccacaacacccatccaaggaatggccactgctcttcagctcccagagtcaccagtggttccacttacatacttgtccctctaagtcatttagcccaaaactaaaacacaatgtgaaaatgtatctgagtattgaatgataattcagtccttgcctttgaagggtatgtcacaaggagctgacagtgcttctacacatttcatctaatttaatattcctggcatacctttaaggtaaattggtcaggaactattaattccatgtgatacattaggaagctgaattattagtaacaacaataataattaaagaatgcaatactgtaaaaaagcggccgcgaatt

SEQ ID NO: 197 - protein, 695 aa, Homo sapiens
MALLLVSLLAFLSLGSGCHHRICHCSNRVFLCQESKVTEIPSDLPRNAIELRFVLTKLRVIQKGAFSGFGDLEKIEISQNDVLEVIEADVFSNLPKLHEIRIEKANNLLYINPEAFQNLPNLQYLLISNTGIKHLPDVHKIHSLQKVLLDIQDNINIHTIERNSFVGLSFESVILWLNKNGIQEIHNCAFNGTQLDELNLSDNNNLEELPNDVFHGASGPVILDISRTRIHSLPSYGLENLKKLRARSTYNLKKLPTLEKLVALMEASLTYPSHCCAFANWRRQISELHPICNKSILRQEVDYMTQARGQRSSLAEDNESSYSRGFDMTYTEFDYDLCNEVVDVTCSPKPDAFNPCEDIMGYNILRVLIWFISILAITGNIIVLVILTTSQYKLTVPRFLMCNLAFADLCIGIYLLLIASVDIHTKSQYHNYAIDWQTGAGCDAAGFFTVFASELSVYTLTAITLERWHTITHAMQLDCKVQLRHAASVMVMGWIFAFAAALFPIFGISSYMKVSICLPMDIDSPLSQLYVMSLLVLNVLAFVVICGCYIHIYLTVRNPNIVSSSSDTRIAKRMAMLIFTDFLCMAPISFFAISASLKVPLITVSKAKILLVLFHPINSCANPFLYAIFTKNFRRDFFILLSKCGCYEMQAQIYRTETSSTVHNTHPRNGHCSSAPRVTSGSTYILVPLSHLAQN

SEQ ID NO: 198 - DNA, 6378 bp, Homo sapiens
cccattactgttggagctacagggagagaaacaggaggagactgcaagagatcatttgggaaggccgtgggcacgctctttactccatgtgtgggacattcattgcggaataacatcggaggagaagtttcccagagctatggggacttcccatccggcgttcctggtcttaggctgtcttctcacagggctgagcctaatcctctgccagctttcattaccctctatccttccaaatgaaaatgaaaaggttgtgcagctgaattcatccttttctctgagatgctttggggagagtgaagtgagctggcagtaccccatgtctgaagaagagagctccgatgtggaaatcagaaatgaagaaaacaacagcggcctttttgtgacggtcttggaagtgagcagtgcctcggcggcccacacagggttgtacacttgctattacaaccacactcagacagaagagaatgagcttgaaggcaggcacatttacatctatgtgccagacccagatgtagcctttgtacctctaggaatgacggattatttagtcatcgtggaggatgatgattctgccattataccttgtcgcacaactgatcccgagactcctgtaaccttacacaacagtgagggggtggtacctgcctcctacgacagcagacagggctttaatgggaccttcactgtagggccctatatctgtgaggccaccgtcaaaggaaagaagttccagaccatcccatttaatgtttatgctttaaaagcaacatcagagctggatctagaaatggaagctcttaaaaccgtgtataagtcaggggaaacgattgtggtcacctgtgctgtttttaacaatgaggtggttgaccttcaatggacttaccctggagaagtgaaaggcaaaggcatcacaatgctggaagaaatcaaagtcccatccatcaaattggtgtacactttgacggtccccgaggccacggtgaaagacagtggagattacgaatgtgctgcccgccaggctaccagggaggtcaaagaaatgaagaaagtcactatttctgtccatgagaaaggtttcattgaaatcaaacccaccttcagccagttggaagctgtcaacctgcatgaagtcaaacattttgttgtagaggtgcgggcctacccacctcccaggatatcctggctgaaaaacaatctgactctgattgaaaatctcactgagatcaccactgatgtggaaaagattcaggaaataaggtatcgaagcaaattaaagctgatccgtgctaaggaagaagacagtggccattatactattgtagctcaaaatgaagatgctgtgaagagctatacttttgaactgttaactcaagttccttcatccattctggacttggtcgatgatcaccatggctcaactgggggacagacggtgaggtgcacagctgaaggcacgccgcttcctgatattgagtggatgatatgcaaagatattaagaaatgtaataatgaaacttcctggactattttggccaacaatgtctcaaacatcatcacggagatccactcccgagacaggagtaccgtggagggccgtgtgactttcgccaaagtggaggagaccatcgccgtgcgatgcctggctaagaatctccttggagctgagaaccgagagctgaagctggtggctcccaccctgcgttctgaactcacggtggctgctgcagtcctggtgctgttggtgattgtgatcatctcacttattgtcctggttgtcatttggaaacagaaaccgaggtatgaaattcgctggagggtcattgaatcaatcagcccggatggacatgaatatatttatgtggacccgatgcagctgccttatgactcaagatgggagtttccaagagatggactagtgcttggtcgggtcttggggtctggagcgtttgggaaggtggttgaaggaacagcctatggattaagccggtcccaacctgtcatgaaagttgcagtgaagatgctaaaacccacggccagatccagtgaaaaacaagctctcatgtctgaactgaagataatgactcacctggggccacatttgaacattgtaaacttgctgggagcctgcaccaagtcaggccccatttacatcatcacagagtattgcttctatggagatttggtcaactatttgcataagaatagggatagcttcctgagccaccacccagagaagccaaagaaagagctggatatctttggattgaaccctgctgatgaaagcacacggagctatgttattttatcttttgaaaacaatggtgactacatggacatgaagcaggctgatactacacagtatgtccccatgctagaaaggaaagaggtttctaaatattccgacatccagagatcactctatgatcgtccagcctcatataagaagaaatctatgttagactcagaagtcaaaaacctcctttcagatgataactcagaaggccttactttattggatttgttgagcttcacctatcaagttgcccgaggaatggagtttttggcttcaaaaaattgtgtccaccgtgatctggctgctcgcaacgtcctcctggcacaaggaaaaattgtgaagatctgtgactttggcctggccagagacatcatgcatgattcgaactatgtgtcgaaaggcagtacctttctgcccgtgaagtggatggctcctgagagcatctttgacaacctctacaccacactgagtgatgtctggtcttatggcattctgctctgggagatcttttcccttggtggcaccccttaccccggcatgatggtggattctactttctacaataagatcaagagtgggtaccggatggccaagcctgaccacgctaccagtgaagtctacgagatcatggtgaaatgctggaacagtgagccggagaagagaccctccttttaccacctgagtgagattgtggagaatctgctgcctggacaatataaaaagagttatgaaaaaattcacctggacttcctgaagagtgaccatcctgctgtggcacgcatgcgtgtggactcagacaatgcatacattggtgtcacctacaaaaacgaggaagacaagctgaaggactgggagggtggtctggatgagcagagactgagcgctgacagtggctacatcattcctctgcctgacattgaccctgtccctgaggaggaggacctgggcaagaggaacagacacagctcgcagacctctgaagagagtgccattgagacgggttccagcagttccaccttcatcaagagagaggacgagaccattgaagacatcgacatgatggacgacatcggcatagactcttcagacctggtggaagacagcttcctgtaactggcggattcgaggggttccttccacttctggggccacctctggatcccgttcagaaaaccactttattgcaatgcggaggttgagaggaggacttggttgatgtttaaagagaagttcccagccaagggcctcggggagcgttctaaatatgaatgaatgggatattttgaaatgaactttgtcagtgttgcctctcgcaatgcctcagtagcatctcagtggtgtgtgaagtttggagatagatggataagggaataataggccacagaaggtgaactttgtgcttcaaggacattggtgagagtccaacagacacaatttatactgcgacagaacttcagcattgtaattatgtaaataactctaaccaaggctgtgtttagattgtattaactatcttctttggacttctgaagagaccactcaatccatccatgtacttccctcttgaaacctgatgtcagctgctgttgaactttttaaagaagtgcatgaaaaaccatttttgaaccttaaaaggtactggtactatagcattttgctatcttttttagtgttaagagataaagaataataattaaccaaccttgtttaatagatttgggtcatttagaagcctgacaactcattttcatattgtaatctatgtttataatactactactgttatcagtaatgctaaatgtgtaataatgtaacatgatttccctccagagaaagcacaatttaaaacaatccttactaagtaggtgatgagtttgacagtttttgacatttatattaaataacatgtttctctataaagtatggtaatagctttagtgaattaaatttagttgagcatagagaacaaagtaaaagtagtgttgtccaggaagtcagaatttttaactgtactgaataggttccccaatccatcgtattaaaaaacaattaactgccctctgaaataatgggattagaaacaaacaaaactcttaagtcctaaaagttctcaatgtagaggcataaacctgtgctgaacataacttctcatgtatattacccaatggaaaatataatgatcagcaaaaagactggatttgcagaagttttttttttttttcttcatgcctgatgaaagctttggcaaccccaatatatgtattttttgaatctatgaacctgaaaagggtcagaaggatgcccagacatcagcctccttctttcaccccttaccccaaagagaaagagtttgaaactcgagaccataaagatattctttagtggaggctggatgtgcattagcctggatcctcagttctcaaatgtgtgtggcagccaggatgactagatcctgggtttccatccttgagattctgaagtatgaagtctgagggaaaccagagtctgtatttttctaaactccctggctgttctgatcggccagttttcggaaacactgacttaggtttcaggaagttgccatgggaaacaaataatttgaactttggaacagggttggaattcaaccacgcaggaagcctactatttaaatccttggcttcaggttagtgacatttaatgccatctagctagcaattgcgaccttaatttaactttccagtcttagctgaggctgagaaagctaaagtttggttttgacaggttttccaaaagtaaagatgctacttcccactgtatgggggagattgaactttccccgtctcccgtcttctgcctcccactccataccccgccaaggaaaggcatgtacaaaaattatgcaattcagtgttccaagtctctgtgtaaccagctcagtgttttggtggaaaaaacattttaagttttactgataatttgaggttagatgggaggatgaattgtcacatctatccacactgtcaaacaggttggtgtgggttcattggcattctttgcaatactgcttaattgctgataccatatgaatgaaacatgggctgtgattactgcaatcactgtgctatcggcagatgatgctttggaagatgcagaagcaataataaagtacttgactacctactggtgtaatctcaatgcaagccccaactttcttatccaactttttcatagtaagtgcgaagactgagccagattggccaattaaaaacgaaaacctgactaggttctgtagagccaattagacttgaaatacgtttgtgtttctagaatcacagctcaagcattctgtttatcgctcactctcccttgtacagccttattttgttggtgctttgcattttgatattgctgtgagccttgcatgacatcatgaggccggatgaaacttctcagtccagcagtttccagtcctaacaaatgctcccacctgaatttgtatatgactgcatttgtgggtgtgtgtgtgttttcagcaaattccagatttgtttccttttggcctcctgcaaagtctccagaagaaaatttgccaatctttcctactttctatttttatgatgacaatcaaagccggcctgagaaacactatttgtgactttttaaacgattagtgatgtccttaaaatgtggtctgccaatctgtacaaaatggtcctatttttgtgaagagggacataagataaaatgatgttatacatcaatatgtatatatgtatttctatatagacttggagaatactgccaaaacatttatgacaagctgtatcactgccttcgtttatatttttttaactgtgataatccccacaggcacattaactgttgcacttttgaatgtccaaaatttatattttagaaataataaaaagaaagatacttacatgttcccaaaacaatggtgtggtgaatgtgtgagaaaaactaacttgatagggtctaccaatacaaaatgtattacgaatgcccctgttcatgtttttgttttaaaacgtgtaaatgaagatctttatatttcaataaatgatatataatttaaagtt

SEQ ID NO: 199 - protein, 1089 aa, Homo sapiens
MGTSHPAFLVLGCLLTGLSLILCQLSLPSILPNENEKVVQLNSSFSLRCFGESEVSWQYPMSEEESSDVEIRNEENNSGLFVTVLEVSSASAAHTGLYTCYYNHTQTEENELEGRHIYIYVPDPDVAFVPLGMTDYLVIVEDDDSAIIPCRTTDPETPVTLHNSEGVVPASYDSRQGFNGTFTVGPYICEATVKGKKFQTIPFNVYALKATSELDLEMEALKTVYKSGETIVVTCAVFNNEVVDLQWTYPGEVKGKGITMLEEIKVPSIKLVYTLTVPEATVKDSGDYECAARQATREVKEMKKVTISVHEKGFIEIKPTFSQLEAVNLHEVKHFVVEVRAYPPPRISWLKNNLTLIENLTEITTDVEKIQEIRYRSKLKLIRAKEEDSGHYTIVAQNEDAVKSYTFELLTQVPSSILDLVDDHHGSTGGQTVRCTAEGTPLPDIEWMICKDIKKCNNETSWTILANNVSNIITEIHSRDRSTVEGRVTFAKVEETIAVRCLAKNLLGAENRELKLVAPTLRSELTVAAAVLVLLVIVIISLIVLVVIWKQKPRYEIRWRVIESISPDGHEYIYVDPMQLPYDSRWEFPRDGLVLGRVLGSGAFGKVVEGTAYGLSRSQPVMKVAVKMLKPTARSSEKQALMSELKIMTHLGPHLNIVNLLGACTKSGPIYIITEYCFYGDLVNYLHKNRDSFLSHHPEKPKKELDIFGLNPADESTRSYVILSFENNGDYMDMKQADTTQYVPMLERKEVSKYSDIQRSLYDRPASYKKKSMLDSEVKNLLSDDNSEGLTLLDLLSFTYQVARGMEFLASKNCVHRDLAARNVLLAQGKIVKICDFGLARDIMHDSNYVSKGSTFLPVKWMAPESIFDNLYTTLSDVWSYGILLWEIFSLGGTPYPGMMVDSTFYNKIKSGYRMAKPDHATSEVYEIMVKCWNSEPEKRPSFYHLSEIVENLLPGQYKKSYEKIHLDFLKSDHPAVARMRVDSDNAYIGVTYKNEEDKLKDWEGGLDEQRLSADSGYIIPLPDIDPVPEEEDLGKRNRHSSQTSEESAIETGSSSSTFIKREDETIEDIDMMDDIGIDSSDLVEDSFL

SEQ ID NO: 200 - DNA, 2807 bp, Homo sapiens
tgattttgggacccagccatggtccttctgcttcttctttaaaatacccactttctccccatcgccaagcggcgtttggcaatatcagatatccactctatttatttttacctaaggaaaaactccagctcccttcccactcccagctgccttgccacccctcccagccctctgcttgccctccacctggcctgctgggagtcagagcccagcaaaacctgtttagacacatggacaagaatcccagcgctacaaggcacacagtccgcttcttcgtcctcagggttgccagcgcttcctggaagtcctgaagctctcgcagtgcagtgagttcatgcaccttcttgccaagcctcagtctttgggatctggggaggccgcctggttttcctccctccttctgcacgtctgctggggtctcttcctctccaggccttgccgtccccctggcctctcttcccagctcacacatgaagatgcacttgcaaagggctctggtggtcctggccctgctgaactttgccacggtcagcctctctctgtccacttgcaccaccttggacttcggccacatcaagaagaagagggtggaagccattaggggacagatcttgagcaagctcaggctcaccagcccccctgagccaacggtgatgacccacgtcccctatcaggtcctggccctttacaacagcacccgggagctgctggaggagatgcatggggagagggaggaaggctgcacccaggaaaacaccgagtcggaatactatgccaaagaaatccataaattcgacatgatccaggggctggcggagcacaacgaactggctgtctgccctaaaggaattacctccaaggttttccgcttcaatgtgtcctcagtggagaaaaatagaaccaacctattccgagcagaattccgggtcttgcgggtgcccaaccccagctctaagcggaatgagcagaggatcgagctcttccagatccttcggccagatgagcacattgccaaacagcgctatatcggtggcaagaatctgcccacacggggcactgccgagtggctgtcctttgatgtcactgacactgtgcgtgagtggctgttgagaagagagtccaacttaggtctagaaatcagcattcactgtccatgtcacacctttcagcccaatggagatatcctggaaaacattcacgaggtgatggaaatcaaattcaaaggcgtggacaatgaggatgaccatggccgtggagatctggggcgcctcaagaagcagaaggatcaccacaaccctcatctaatcctcatgatgattcccccacaccggctcgacaacccgggccaggggggtcagaggaagaagcgggctttggacaccaattactgcttccgcaacttggaggagaactgctgtgtgcgccccctctacattgacttccgacaggatctgggctggaagtgggtccatgaacctaagggctactatgccaacttctgctcaggcccttgcccatacctccgcagtgcagacacaacccacagcacggtgctgggactgtacaacactctgaaccctgaagcatctgcctcgccttgctgcgtgccccaggacctggagcccctgaccatcctgtactatgttgggaggacccccaaagtggagcagctctccaacatggtggtgaagtcttgtaaatgtagctgagaccccacgtgcgacagagagaggggagagagaaccaccactgcctgactgcccgctcctcgggaaacacacaagcaacaaacctcactgagaggcctggagcccacaaccttcggctccgggcaaatggctgagatggaggtttccttttggaacatttctttcttgctggctctgagaatcacggtggtaaagaaagtgtgggtttggttagaggaaggctgaactcttcagaacacacagactttctgtgacgcagacagaggggatggggatagaggaaagggatggtaagttgagatgttgtgtggcaatgggatttgggctaccctaaagggagaaggaagggcagagaatggctgggtcagggccagactggaagacacttcagatctgaggttggatttgctcattgctgtaccacatctgctctagggaatctggattatgttatacaaggcaagcattttttttttttttttaaagacaggttacgaagacaaagtcccagaattgtatctcatactgtctgggattaagggcaaatctattacttttgcaaactgtcctctacatcaattaacatcgtgggtcactacagggagaaaatccaggtcatgcagttcctggcccatcaactgtattgggccttttggatatgctgaacgcagaagaaagggtggaaatcaaccctctcctgtctgccctctgggtccctcctctcacctctccctcgatcatatttccccttggacacttggttagacgccttccaggtcaggatgcacatttctggattgtggttccatgcagccttggggcattatgggttcttcccccacttcccctccaagaccctgtgttcatttggtgttcctggaagcaggtgctacaacatgtgaggcattcggggaagctgcacatgtgccacacagtgacttggccccagacgcatagactgaggtataaagacaagtatgaatattactctcaaaatctttgtataaataaatatttttggggcatcctggatgatttcatcttctggaatattgtttctagaacagtaaaagccttattctaaaaaaaaaaaaaaaa

SEQ ID NO: 201 - protein, 412 aa, Homo sapiens
MKMHLQRALVVLALLNFATVSLSLSTCTTLDFGHIKKKRVEAIRGQILSKLRLTSPPEPTVMTHVPYQVLALYNSTRELLEEMHGEREEGCTQENTESEYYAKEIHKFDMIQGLAEHNELAVCPKGITSKVFRFNVSSVEKNRTNLFRAEFRVLRVPNPSSKRNEQRIELFQILRPDEHIAKQRYIGGKNLPTRGTAEWLSFDVTDTVREWLLRRESNLGLEISIHCPCHTFQPNGDILENIHEVMEIKFKGVDNEDDHGRGDLGRLKKQKDHHNPHLILMMIPPHRLDNPGQGGQRKKRALDTNYCFRNLEENCCVRPLYIDFRQDLGWKWVHEPKGYYANFCSGPCPYLRSADTTHSTVLGLYNTLNPEASASPCCVPQDLEPLTILYYVGRTPKVEQLSNMVVKSCKCS

SEQ ID NO: 202 - DNA, 2240 bp, Homo sapiens
acttccccgccctcgccccaaaggagcagcagctccttcttgcctctccattgccgccgccgcaccggcggagctcctctctcgcgcgtctctcctccgatggagctcgggcgccgccgacgccgccgctgccccgaaccctgagcggggccgccccggtcggaggaacgcgccgcccagtccgagggcgcagagcgccaggagcacgcggagggctggggcgcgggctccgggaacgagaaagtgcagctctctcgggtcactgggccggcggcggggggactatggctctgaaggacacgggcagcggcggcagcaccatcctgcccattagcgagatggtttcctcgtccagctcgcccggcgcgtcggccgccgccgccccggggccctgcgcaccctcgcccttccctgaagtagtggagctgaacgtaggcggccaggtttatgtgaccaagcactcgacgctgctcagcgtcccggacagtactttggccagcatgttctcgccctctagtccccgtggcggcgcccggcgccggggcgagctgcccagggacagccgggcgcgcttcttcatcgaccgggacggcttccttttcaggtacgtgctggattatctgcgggacaagcaactcgcgctgccggagcacttccccgagaaggagcggctgctgcgcgaggccgagtatttccagctcaccgacttggtcaagctgctgtcgcccaaggtcaccaagcagaactctctcaacgacgagggctgccagagcgacctggaggacaacgtctcgcagggtagcagcgacgcgctgctgctgcgcggggcggcggccgccgtgccctcgggcccgggagcgcacggtggtggcggcggcggcggcgcgcaggacaagcgctcgggcttcctcacgctgggctaccggggctcctacaccaccgtgcgcgacaaccaggccgacgccaaattccggcgtgtggcgcgcatcatggtgtgcgggcgcatcgcgctggccaaggaggtcttcggggacacgctcaacgagagccgcgaccccgaccggcagccggagaagtacacgtcccgcttctacctcaagttcacctacttggagcaggcctttgatcgcctgtccgaggccggcttccacatggtggcgtgtaactcctcgggcaccgccgccttcgtcaaccagtaccgcgacgacaagatctggagcagctacaccgagtacattttcttccgaccacctcagaaaatagtatcacctaaacaagaacatgaagataggaaacatgacaaagtcactgataaaggaagtgaaagtgggacttcctgtaatgagctctccacttccagttgtgacagccattcagaggcaagcactccccaggacaacccatccagtgcccagcaggcaacagctcaccaacctaacactttaacattggatcgcccctctaaaaaagcacctgtacaatggatacccccaccagacaaacgcagaaacagtgaactctttcagaccctcatcagcaagtcccgggaaacaaatctgtccaaaaagaaagtctgtgagaagctaagtgtggaagaagaaatgaaaaagtgtattcaggattttaaaaaaatccacattccagattattttccagagcgcaaacgccaatggcaatctgaactgttgcagaagtatgggttatagtaattgtcacattcctgcagtattttgatgacattcaatgtttactacagtgtcaccacctgactgatgtcctaacaatggtcagtgtgattcttgctgctcttccttgttgtgaacagtggatgtgggacagtattttcttttatgttttagttgttgttctttttagaaacatgattaaaaaggaaaaaatattaaatcaataagtgttaaatcaaaatggaatatctgattcaaaccattttacaagaatgaaagtaaaatgtgcatgatcaagcttagtatcttggtttttgaactctggtcaactggatatgtttgtcattttgtaacttaccaaaaacaaaccatcatatcataccaactaaaatgatatatggatgaagcaacatcaagtaaaattttagacgatggctataggacccaaatctaaagctgtctaaatgttaattcaatgaaacaagtattatttttgcatgaatacaatgttacaaataaatcacaagaaatagggaagatctgtttgttgcttgg

SEQ ID NO: 203 - protein, 473 aa, Homo sapiens
MALKDTGSGGSTILPISEMVSSSSSPGASAAAAPGPCAPSPFPEVVELNVGGQVYVTKHSTLLSVPDSTLASMFSPSSPRGGARRRGELPRDSRARFFIDRDGFLFRYVLDYLRDKQLALPEHFPEKERLLREAEYFQLTDLVKLLSPKVTKQNSLNDEGCQSDLEDNVSQGSSDALLLRGAAAAVPSGPGAHGGGGGGGAQDKRSGFLTLGYRGSYTTVRDNQADAKFRRVARIMVCGRIALAKEVFGDTLNESRDPDRQPEKYTSRFYLKFTYLEQAFDRLSEAGFHMVACNSSGTAAFVNQYRDDKIWSSYTEYIFFRPPQKIVSPKQEHEDRKHDKVTDKGSESGTSCNELSTSSCDSHSEASTPQDNPSSAQQATAHQPNTLTLDRPSKKAPVQWIPPPDKRRNSELFQTLISKSRETNLSKKKVCEKLSVEEEMKKCIQDFKKIHIPDYFPERKRQWQSELLQKYGL

SEQ ID NO: 204 - DNA, 2983 bp, Homo sapiens
agagatagagtcttccctggcattgcaggagagaatctgaagggatgatggatgcatcaaaagagctgcaagttctccacattgacttcttgaatcaggacaacgccgtttctcaccacacatgggagttccaaacgagcagtcctgtgttccggcgaggacaggtgtttcacctgcggctggtgctgaaccagcccctacaatcctaccaccaactgaaactggaattcagcacagggccgaatcctagcatcgccaaacacaccctggtggtgctcgacccgaggacgccctcagaccactacaactggcaggcaacccttcaaaatgagtctggcaaagaggtcacagtggctgtcaccagttcccccaatgccatcctgggcaagtaccaactaaacgtgaaaactggaaaccacatccttaagtctgaagaaaacatcctataccttctcttcaacccatggtgtaaagaggacatggttttcatgcctgatgaggacgagcgcaaagagtacatcctcaatgacacgggctgccattacgtgggggctgccagaagtatcaaatgcaaaccctggaactttggtcagtttgagaaaaatgtcctggactgctgcatttccctgctgactgagagctccctcaagcccacagataggagggaccccgtgctggtgtgcagggccatgtgtgctatgatgagctttgagaaaggccagggcgtgctcattgggaattggactggggactatgaaggtggcacagccccatacaagtggacaggcagtgccccgatcctgcagcagtactacaacacgaagcaggctgtgtgctttggccagtgctgggtgtttgctgggatcctgactacagtgctgagagcgttgggcatcccagcacgcagtgtgacaggcttcgattcagctcacgacacagaaaggaacctcacggtggacacctatgtgaatgagaatggcaagaaaatcaccagtatgacccacgactctgtctggaatttccatgtgtggacggatgcctggatgaagcgaccggatctgcccaagggctacgacggctggcaggctgtggacgcaacgccgcaggagcgaagccagggtgtcttctgctgtgggccatcaccactgaccgccatccgcaaaggtgacatctttattgtctatgacaccagattcgtcttctcagaagtgaatggtgacaggctcatctggttggtgaagatggtgaatgggcaggaggagttacacgtaatttcaatggagaccacaagcatcgggaaaaacatcagcaccaaggcagtgggccaagacaggcggagagatatcacctatgagtacaagtatccagaaggctcctctgaggagaggcaggtcatggatcatgccttcctccttctcagttctgagagggagcacagacgacctgtaaaagagaactttcttcacatgtcggtacaatcagatgatgtgctgctgggaaactctgttaatttcaccgtgattcttaaaaggaagaccgctgccctacagaatgtcaacatcttgggctcctttgaactacagttgtacactggcaagaagatggcaaaactgtgtgacctcaataagacctcgcagatccaaggtcaagtatcagaagtgactctgaccttggactccaagacctacatcaacagcctggctatattagatgatgagccagttatcagaggtttcatcattgcggaaattgtggagtctaaggaaatcatggcctctgaagtattcacgtctttccagtaccctgagttctctatagagttgcctaacacaggcagaattggccagctacttgtctgcaattgtatcttcaagaataccctggccatccctttgactgacgtcaagttctctttggaaagcctgggcatctcctcactacagacctctgaccatgggacggtgcagcctggtgagaccatccaatcccaaataaaatgcaccccaataaaaactggacccaagaaatttatcgtcaagttaagttccaaacaagtgaaagagattaatgctcagaagattgttctcatcaccaagtagccttgtctgatgctgtggagccttagttgagatttcagcatttcctaccttgtgcttagctttcagattatggatgattaaatttgatgacttatatgagggcagattcaagagccagcaggtcaaaaaggccaacacaaccataagcagccagacccacaaggccaggtcctgtgctatcacagggtcacctcttttacagttagaaacaccagccgaggccacagaatcccatccctttcctgagtcatggcctcaaaaatcagggccaccattgtctcaattcaaatccatagatttcgaagccacagagtctctccctggagcagcagactatgggcagcccagtgctgccacctgctgacgacccttgagaagctgccatatcttcaggccatgggttcaccagccctgaaggcacctgtcaactggagtgctctctcagcactgggatgggcctgatagaagtgcattctcctcctattgcctccattctcctctctctatccctgaaatccaggaagtccctctcctggtgctccaagcagtttgaagcccaatctgcaaggacatttctcaagggccatgtggttttgcagacaaccctgtcctcaggcctgaactcaccatagagacccatgtcagcaaacggtgaccagcaaatcctcttcccttattctaaagctgccccttgggagactccagggagaaggcattgcttcctccctggtgtgaactctttctttggtattccatccactatcctggcaactcaaggctgcttctgttaactgaagcctgctccttcttgttctgccctccagagatttgctcaaatgatcaataagctttaaattaaactctacttcaagaaaaaaaaaccg

SEQ ID NO: 205 - protein, 684 aa, Homo sapiens
MMDASKELQVLHIDFLNQDNAVSHHTWEFQTSSPVFRRGQVFHLRLVLNQPLQSYHQLKLEFSTGPNPSIAKHTLVVLDPRTPSDHYNWQATLQNESGKEVTVAVTSSPNAILGKYQLNVKTGNHILKSEENILYLLFNPWCKEDMVFMPDEDERKEYILNDTGCHYVGAARSIKCKPWNFGQFEKNVLDCCISLLTESSLKPTDRRDPVLVCRAMCAMMSFEKGQGVLIGNWTGDYEGGTAPYKWTGSAPILQQYYNTKQAVCFGQCWVFAGILTTVLRALGIPARSVTGFDSAHDTERNLTVDTYVNENGEKITSMTHDSVWNFHVWTDAWMKRPDLPKGYDGWQAVDATPQERSQGVFCCGPSPLTAIRKGDIFIVYDTRFVFSEVNGDRLIWLVKMVNGQEELHVISMETTSIGKNISTKAVGQDRRRDITYEYKYPEGSSEERQVMDHAFLLLSSEREHRRPVKENFLHMSVQSDDVLLGNSVNFTVILKRKTAALQNVNILGSFELQLYTGKKMAKLCDLNKTSQIQGQVSEVTLTLDSKTYINSLAILDDEPVIRGFIIAEIVESKEIMASEVFTSFQYPEFSIELPNTGRIGQLLVCNCIFKNTLAIPLTDVKFSLESLGISSLQTSDHGTVQPGETIQSQIKCTPIKTGPKKFIVKLSSKQVKEINAQKIVLITK

SEQ ID NO: 206 - DNA, 1172 bp, Homo sapiens
agtgaacaccacgagctagcgtgtctacttcacaggccaggtcgtcaactcaactgtcaaggtgtccattgtaccagctgggccatggatccctcccgcctgaaatctgactccacctgccaagagtctgagcctgcaggcctagatttcgactctgctggccaagattatttctctgcagcccaataattcgactctttctaccaagaattggacctggactctcttaacgaagatcttctttcccagtccatgccacatgccaggacagagacctctgtgggcacatatgaatcccactcgacttctgaactggaggatctgacagagcccgagcaaagagagctcaaaaccaaactcactaaattggaggctgaaattgtaaccctacgccacgtactagcagccaaagagagacgctgtggggaactcaagaggaagttaggcctcaccgccttggtagggctgagacagaatctgtccaagagctggcttgatgttcaggtctccaacacctatgtgaaacagaagacatcagctgctctgtccaccatgggcactctcatctgcaggaagcttggaggcgtgaagaagtcggccacattcagatcttttgaaggaaaccctaaaggagaaggaagcagaatataaccctctggagagctcaagacagtaggaacctggacggtgcttgtttgaattttctgatatctgattttcacacgaatatactttttgtttgttttccttttccattttcaaaatgccaagatctgggagcctctttcactcctctagacacactgcctgagatagaagtttgcatcttattggctgtgggcagagactaggacccttatgggtacatttcagtaatctctcactgcctaaaatggtaatccctccagcctaagaggatgattctgttttgttgactcttgaatgctcccccaacattcctttggttttcctataagcaaaaccaaataccactataaatacaaaagcatctggtaaactgtaaagttactcatgtatcccaaccctccacagatttctgaagacaaagttttgcttggattaaaacaagatgttttactattttgcatgttcgatttttaatttgttgtgtttatcaaccaaaatggctttgtatgctggagaacaagagg

SEQ ID NO: 207 - protein, 132 aa, Homo sapiens
MPHARTETSVGTYESHSTSELEDLTEPEQRELKTKLTKLEAEIVTLRHVLAAKERRCGELKRKLGLTALVGLRQNLSKSWLDVQVSNTYVKQKTSAALSTMGTLICRKLGGVKKSATLRSFEGNPKGEGSRI

SEQ ID NO: 208 - DNA, 2051 bp, Homo sapiens
agttcatcctgagccagctgctgaggcggcggctggggctggggcggctgtggcggcgcctggcaggctccgccagccccctgggagcgggggatgggctccgggcgcggagaaactccctcaacatccatctccatcttcccattcactggagggcaagacaaaagcggagtggagacttggcagcggcgcccggcagctactcagctgcccgtggcacgcatggctcgccgaggaggggccgcctcccgcgcgccctcccttctgccacccttcgcccccgctccccgcagctccgctcgcctgcttggctccggccctggcggcgtctgggccggggtgcgcgaggagcgggtggccgcgtgtccttggagcgctggccttcaggcgcccccggcagtcccgctaagcagagcgcatcccggcggcggcggcggcggcggcgcctcccagccgcgctcccagcctcagggccgcttgggtacttgctctccagcccggcccacgctcctagccgctttccagcgtctcttggggccccttggcgtttctcctccctaccaaccttctgaacaaagttgctggaagaaccaacctggtcgccgggctttgcccggcgaagctggcaaattccgggcaacagagggtcgatggggtaggaggaaggagaagcgagaagtcgctgccaggcatttactgcaatgtgcccggggcgggcgccagctgggcgccgtctctttttggtggtgagttctgtgctggaagagcgtcctcagcagggcagggctccaccaggaggcttcggtggtgaccccagggcaggcagtgcgttgcgtctataaatttaaatagagatggcgagggtagccttggaaattcttaaatcagggttcaccactagtcaggtgaacaggatgacttctcaatttaacaccacttgatcctgggtagtagcttacaacttcatgggaactgccactgcaactctgcacgtccaggagggactttcaagcagctctggagagaaatggcgggttatcaagaacctgttcaatattaaatagagcccattattctgggctttgaattccataatgctcccaaatggatcagcagattaatgaactattcatgcgtttcttggcagaggatggcttttttcccctagcatgtatcacagatcacacttgcttgatgaaactggaaaattgcattgctcatcccatgaatgctttgcattaacttaaacacaacttttacatatcaagacacactgtcccattgatgcagttacacaagaacacatcattaggttgtatccctcaatgctatcttttaatctgactctgcatgtgtgacagaaattaattgccactttcatcagtgtagacaaccaatctgggtaatgcaatgtgaacaagtttttgaaaaagaagaaaaagtttagggaccaaattacccattctctttttcttcagattttctaaaaatcagatttcaagttcgttttctaaattgggaattgttgaaaatagagtgagctcctccccagtacctggtaataaaccaacaatcattatagaacgtttataatggtaaattagattatatgtgtaatgtgcttagcagagtgtctttgtgcatatcgagcacctaacattgttataccgagaacagtaagatgatatatgtccacactgagtgttcatctgaagaccttgatttacaaaatagaagctaccggtttaaatcacctttatttaaatttcctaaaagatatttggtatctttagagaatgaagccccttctgaagacaggaagaaagtcaataatattttgtgcaataaaggtttgaatttgtcaggtttttgtttttttttttttccctacagtgtagcaataaaaatcacatgtcagttcagacagcagcaggaatagctgactggtaagttattattcttccatgcttgctacttccaaaatacgtttgtgaacttctttcaaggcttaaatgaagattaaatcaaaataaagatacaatacttcaatt

SEQ ID NO: 209 - DNA, 3556 bp, Homo sapiens
cgcctcctcctccaccagcaccactccctccggggcaccccggtccctgcagagtccctggccggcgccgcctccgctgcggccccctgaatcccgagcctgcctcgcccaagctggtaggacagaaggacagacagattcctctagcctagcgctccgccgctgctgccttacgcggccccgcgtcgggagaactgggatcgccccaagagcaccgcgaggggtcatctcaggctggctgcatgcctcagctgaagatcccagctcctgtcaatgccacctctctgcttgactgtctccttccagattcgagcaggtatgagctgggaagaatgaaggcagggcatgcccgtgtgccagctctgcacagctggatagctgaggaaagatgtggaggagaagccggggattgtgtggaagtctaagggtgttgtttgccctttgggttccagaagatgcatgccaggaccctgggtggcactgccaggaagcaacagagaggagataaaactcacagcagacagacttgccttaacaacaactcccttgaattaaaacacgcttttcaagaaaacaaattatcagttcgatcagcaaacagcagagaagtttctctcataatggcaaagaagggccgggttgctgaccagtgaaagagcttcagaaaaggagaggggagatgagatggccagaaggagcaagagcaccgtacatccctggacaacctcattctaatgggtcaggggctgggacgtgcattttggagtgcaggagaagtggcaactcacaaatgctagattttcttctagagatgaccaagctgtagttcttaaagcagtggcactagggcagaaaactctcacactttgatgtgcacacacagcccctggggatcttgttgacatgtagattctgattccgtaagtcgggctgagattctgcatttccaacaagctcctagatgaggtccattttgctggtccatgaaacacacttagaataagtagcaaggtataggaggatactgactttgctcagtgatgcttgggcttccgtccaaactaaaataaaacaaaagcagacataaatggcccaattcaacagcctgagaagtttggtgataatgacccaagccctggcctggtgaccaagtggctgctcagagagctctatctccaaactccttcccttcctgcctcccctccaagagtgagtaatgtgccagagttcattggggtctgctgtccccagggaaaggtggcccagttgccaagtgcaagtgtatagaacggcttacctgtgcaaagctatcagccctggacctatgggcctagaaacattacttgccactcactcactcactatcattcattcatttctgcaacaaacacttcctgagcatatgctatacaccaggccctgagctcagctctggggatacaggatgaatggcagattgtgccatcaggaagccgactgcacagtcagcccgctggagcacatatgaaaaacaatacggatgttttgatttattatcatattgatcattatgatggtagcgtatacttttggaaggcttgccatacattaggcattgtgctaagcacattatatggttaatctcatcaatcttcacaacctatgtggcaggtactattattaaacccacttcaaagaggagggaactgaacctcagagagggtaagtgacttgcacaaggacacaagctagtgaggagaggaactgagaggaatggccagacaggccatcagcctctgtccccacatgctgggtctgagtgtctgacggtggacacattcccttcctggagggagagctcctagggagctgatggcagcactgagtctggaatgtgatgggagtgcattagatgacgtgggtgatctgatgagtacagaggcgtcacactgcaatgacttcatgcacatatctccccttgaatgcacagagattcagcagaggccaggagctcaagtttctggcccagtgtccccctcttcccctggggaaagccagggacacactgcctggctttgctacacctttctaggcaaaggcagtatgctctccctctccttggcctccctggctgtccacacatccacacccactcacacacacatgcacatgatcatacacattacacaagcccacatgcccacagacatgctcacactcacactcacatgcatacactgccatacacaacacacatacatacattcacacacacttgcacacacacacacacacacagttctgatggccaatcttttggggctatgttgacactgtgaagcaggtgaaacaaagtctttgccactccctgctttgggcctattatgtttgttttatagtttaactctcaaaagacaactttattttccaaaattattcaggttcccagccaggtgcagtggctcacacctgtaatcccagtactttgggaggccaaggcgggcagatcacctgaggtcaggagtttgagaccagcttggccaacatggtgaaacccagtctctactaaaaatacaaaaattagccagacatggtggcacacacatgtaatcccagctattcgggaggctgaggcaggagaatcgcttgaacccgggaggcggaggttgcagtgggccaagatcgtgccactgcactccagcctgggcaacagagcaagactccatctcaaaaaacaaaaacaaaatcattcaggttctgtaggggaccctcactgtgtcctggattccattccacttttaaagtcccaaacagcttgtatggccacttcccttgacacccaaaccagataggagtcttaaatgacacagagtattgatggtttctttaaaaggaaatccactctcaatgggaagctggataacttcgcatccagatttcatccatcttgggctttggtggctgctgtttgtttttgtgcaggagaatctctcccagccaacgtcgatttcactaacacagtggttaacctttgctctctactcctgcatcaatcttccgcctaccgcatgttgagccatgctgctttctggcattccttttggattttcagtttactacccaactaccagtcctaataacatcagataaaagggcttccgctgtgctgcacttgttttcaaaaactataaatgccatcgacccagagttaagtccagcctcagagagacagaatataaatacccaagtggccctgggccactgagttcctcagacattatgtgctatgggagttccagaaagggggattgcctggttttgagtgcagaaggcttcctggaggaggcgagatttctgatgggcctctgttatgagctaaattgagtccaccccaaaattcagatgttcaaatcctaacctgtagtacctaagcatgtggccttatttggaagcagaagcataacagaggtaattcgttaagatgaggtcacagtggaagagggtggaccccaatctgatacaactcgtgtccttataaaaagcagaaatttgaagacagacacacaagaagatgaag

SEQ ID NO: 210 - DNA, 3132 bp, Homo sapiens
cccgcatctcctgcacatctccacccctgcgcaggaggagatccccaggctgctctctccatctctcctacagctccctgcaaacgagggggaagctgctgagagtccctatcactgctggccttttaatgttgtatgcaaggaggaagagggcgagggataacttggtgctggacaactgacctgcggcccgaagggcctctggggagggggtgcaaaagaggagcggctgggctgggggactccatgcgggggcgatggacagggcggcgctcctgggactggcccgcttgtgcgcgctgtgggcagccctgctcgtgctgttcccctacggagcccaaggaaactggatgtggttgggcattgcctccttcggggttccagagaagctgggctgcgccaatttgccgctgaacagccgccagaaggagctgtgcaagaggaaaccgtacctgctgccgagcatccgagagggcgcccggctgggcattcaggagtgcgggagccagttcagacacgagagatggaactgcatgatcaccgccgccgccactaccgccccgatgggcgccagccccctctttggctacgagctgagcagcggcaccaaagagacagcatttatttatgctgtgatggctgcaggcctggtgcattctgtgaccaggtcatgcagtgcaggcaacatgacagagtgttcctgtgacaccaccttgcagaacggcggctcagcaagtgaaggctggcactgggggggctgctccgatgatgtccagtatggcatgtggttcagcagaaagttcctagatttccccatcggaaacaccacgggcaaagaaaacaaagtactattagcaatgaacctacataacaatgaagctggaaggcaggctgtcgccaagttgatgtcagtagactgccgctgccacggagtttccggctcctgtgctgtgaaaacatgctggaaaaccatgtcttcttttgaaaagattggccatttgttgaaggataaatatgaaaacagtatccagatatcagacaaaacaaagaggaaaatgcgcaggagagaaaaagatcagaggaaaataccaatccataaggatgatctgctctatgttaataagtctcccaactactgtgtagaagataagaaactgggaatcccagggacacaaggcagagaatgcaaccgtacatcagagggtgcagatggctgcaacctcctctgctgtggccgaggttacaacacccatgtggtcaggcacgtggagaggtgtgagtgtaagttcatctggtgctgctatgtccgttgcaggaggtgtgaaagcatgactgatgtccacacttgcaagtaaccactccatccagccttgggcaagatgcctcagcaatatacaatggcattgcaaccagagaggtgcccatccctgtgcagcgctagtaaagttgactcttgcagtggaatccctagaaccttggacctgagagtttcccttacctgatcgacatattttcctttatctgatcaacccatcaatcatgtggatttcttgggattctaatgttgaaaaggtttatattcaccttttgatgatttggggaatatatattgacatacaaggaagataatctgtttcctaagcaagaaataacaggaaagatcccttatgccaggaggcctgccatactcaggataagatccttgaatatggaacttagttacaggactcaataatggtgggtgaacattagtcatttttaaaagacacctcttatagcaataaggagacattaacatgaatctcatttattctctcagtattttaactgaagaaattatactgtttgtgtgtggatagaagatgttgaaaagttaacataagcattgggtgctgacttaccctttcatgtacttccaaagaaaggtaatcaaaaagaatcttcttaagtgatataatatccctaaaaaaatgatcattacagatgtttagtgacaaagaatcaatatgtaaaaagtataatgaatgatttagattttaagtgccttttcactgggagaatctggaaaaacctccataaggtatatagcaatctttgatctttagattcatacttttatcacagatcagtttcaactgttaaaaacccacctctgagatactggggggaggatcctgaaacatgcgggaaaaggagaggtaaacagtggaggtaaaaatataatttcatacattgtaaagaaaagcaccctttaaatgtgtaaagacagtgttttgtaaagaattttgtttaaaaagtttctattttgtaaatacagtacttaagttatatgatttatattaaaacatttattgacaaagcctaagagctaaggcagtaaaattatctcataaataatattagcttattttttttcatactattaatgctatttttttggacatcgaagagaatttaacttagcagttagttatatggatgtgtatttcttgctaaaatgacagttttatatgttatagattaaaatatgttgcaaaatatcaaaaatttgtgttatttcagcagtaagattaattgaattctcttttcacattagttatgcttaactcataaggttattataataaattatattagtaaaagtcttaactggaaaaaagaatctaaatcagaatagtgatcaatttgtggatttgatatcctggatatttattatattttatgtaatgctgcatttctatttgaatgttaagtggtctttcttgtttttaatattcatgcatgtatattcatcatattttacaaggttcctggtaaaaattacagggctctatttaaggatgtattttaatgtaaatgcttatgttttttatgaattgttaaatatttcagtattatatagaaaaaaatagatttttaaaattcagaatggacaaagagaatattcattttcttattaataagataaagaaatgtttccctgccccacagtcttcattctatttctctttaattttattcactgaggcagagaaacaatttttgaaaaagagcaaacccatggaaaatgtctcagatctaatattaaaatcaagactaagcatttaactgtgaaaaaaaaaaaaaaaaaaa

SEQ ID NO: 211 - protein, 365 aa, Homo sapiens
MDRAALLGLARLCALWAALLVLFPYGAQGNWMWLGIASFGVPEKLGCANLPLNSRQKELCKRKPYLLPSIREGARLGIQECGSQFRHERWNCMITAAATTAPMGASPLFGYELSSGTKETAFIYAVMAAGLVHSVTRSCSAGNMTECSCDTTLQNGGSASEGWHWGGCSDDVQYGMWFSRKFLDFPIGNTTGKENKVLLAMNLHNNEAGRQAVAKLMSVDCRCHGVSGSCAVKTCWKTMSSFEKIGHLLKDKYENSIQISDKTKRKMRRREKDQRKIPIHKDDLLYVNKSPNYCVEDKKLGIPGTQGRECNRTSEGADGCNLLCCGRGYNTHVVRHVERCECKFIWCCYVRCRRCESMTDVHTCK

SEQ ID NO: 212 - DNA, 4182 bp, Homo sapiens
  modified_base (4174)..(4174): a, c, t, g, unknown or other
ccagtttccacttttgagaagcaggatgttgaatgtgagtaatgacacaacaggcctataaaatgcggactaaccctcggatgactcatccggtacaatgcagctactatttgtcaaggagactgaactcatactatgggggaaaccacttctcaggcagccagctggttctcaggtcagcaagagacgatccatttttatcggaagctttatagtagcaataatgctaatacccagcactcgggctccacaatgtagaggaaatggcatcgcctggcagtgacagctatattgtgcgtgtcaaggctgtggttatgaccagagatgactccagcgggggatggttcccacaggaaggaggcgggatcagtcgcgtcggggtctgtaaggtcatgcaccccgaaggcaatggacgaagcggctttctcatccatggtgaacgacagaaagacaaactggtggtattggaatgctatgtaagaaaggacttggtctacaccaaagccaatccaacgtttcatcactggaaggtcgataataggaagtttggacttactttccaaagccctgctgatgcccgagcctttgacaggggagtaaggaaagcaatcgaagaccttatagaaggttcaacaacgtcatcttccaccatccataatgaagctgagcttggcgatgatgacgtttttacaacagctacagacagttcttctaattcctctcagaagagagagcaacctactcggacaatctcctctcccacatcctgtgagcaccggaggatttataccctgggccacctccacgactcataccccacagaccactatcacctcgatcagccgatgccaaggccctaccgccaggtgagcttcccggacgacgacgaggagatcgtgcgcatcaacccccgggagaagatctggatgacggggtacgaggattaccggcacgcacccgtcaggggcaagtacccggacccctcggaggacgcggactcctcctacgtgcgcttcgccaagggcgaggtccccaagcatgactacaactacccctacgtggactcctcagactttggcctaggcgaggaccccaaaggccgcgggggcagcgtgatcaagacgcagccctcccggggcaagtcgcggcggcggaaggaggacggagagcgctcgcggtgcgtgtactgcagggacatgttcaaccacgaggagaaccgccggggccactgccaggacgcgcccgactccgtgagaacttgcatccgccgggtgagctgcatgtggtgcgcggacagcatgctctatcactgtatgtcggaccccgagggagactatacagacccttgctcgtgcgatactagcgacgagaagttttgcctccggtggatggctcttattgccttgtctttcctggccccctgtatgtgctgttacctgccccttcgggcctgctaccactgcggagtgatgtgcaggtgctgtggcgggaagcacaaagcggccgcgtgactcagtttccctcccttctccctccatccgcagccacaggggaactcgtctcttacatactctcatcttctcccccgctcccttccactccaaggagcgaggagggcaagcggcctcccagctccctggtacctcgaggcaccattccagccagggacgctgccgggtagactctccactccccctgccgcccacactgcagcagccacatccatacacacacgctcgcacagtgttctgaggaaggaaccttcgccacagactcctgtactattaacaatctgtaaccaagctaactgtctcatccatgtgttgatttcctgtttcctcctcccccgcctcttccagttcaaaggagtctgcaattggaactgctgattttcggtgggttttgtagttgatttttccaagagcgtcgaagactctctttctcttggttcaccttgcctgtcgctagcaagcatctggttcagcggaaatgggatgtgagaatgatgaaacccgacagaagtatctcagcctgcagtcagttattatgtataggaggtgagctagttaacaaacttgtaccacaaaacaatatcgctttaacttttctaaagccaaatttcccatgtaagctgcagtttctatctttagcccatcatcattttctgcccccccaaaatctgttgaaatgattcactgatgcaaaacattcacccgtaatagactgagaattgagccttaacttcagattaacttgtgagaatcaggaaaattccttcaactgcattgcatcctcttggaccagggctagaatggggatttcaggtttctatgagcctccccattacccctaaagtagaacattttttaaattgtgttgccaccacttctaaaaatttagcaatattagaataggatactagtgaagtaagaaattttgcttgttgttttgcaaaccaaatagtttcctcaaacacaaatcagtgttcccacgaacaagttccagttgagaaacactaaggttatggtgaataaaaccatagggagcttcttccccccaacccctggctattttatattaatggggagaggggatttttaaatgtcataaatttgaagagtggtgggttgcattttcttcatgggtttatgttttcgtttcattttggactcaatttcacatcaccaaattcctcatttatacttggggaaaaaacaaggccatatgtaaaaacccttccaatgcctaagtgtctttctcctgcaactccaaacccagactcgccactttgggtgcacaggtggttaggtcagccaactggttctgcctgtcgccttgccacggaggaggcttctaattagctggaaaagagtatttttctaatacgttgcaaggattagccaaatcttcttattgaagaaagaagaaaagtgaagagtggttacctatacctagcatagtacaatcagaacctcgtggagaccaccggggacaggcttgcggacgccggctgttcttcccgccacgatctttctgtggtagcggccagcagaagacatggcctgctccccactccctttccccactccttctttattgcacacaggacaccagtcttcaaggaaagggacttttttccagtctgccaatcatattgggaaagtgctagctgtgctcaccttcatggggctgtttccagctcgtccacaagctcatcgattttctttagtagattaccggtgtaaatacccagtgtgcttatgagtcagttagtagacgtcttcattcattggagtaactggtttaggctttccagtttggaaaaggagcagagagctgtccatctggattgatggaagaaaagagaacctcatccatgcctggagaacatctagaaaaccttcagccagcctccagtgctgtcgagagaccaccttcccccgacccggaggcacttccttggggtctttctctagggtctcttctctacaaagcacaacactaatgttcgtttccttagacctcagttcaagtgcccctatttatttcaataagaacgcacatatcccagctgttttttgtttgtcacctctatttagttgttacctgtttctctcttctttcaccccttgtccttttccacccttttaagagttacgctagcagatcttactccacgtatactttttggtttgtgaaggcatcggttaagggcacaaagacagccatggggacatttatgtaaatacgtctctaattgccacactgcagctgaacagtgtgtagtattttcccagtcagctttgccatactgacgtcaatcatttgagagaaattattcagattttatttttgtatctgtggtaacaaaacattaaccaaaagattttctgtccagaagcctccccgaccccccaagctatttgctcacattaacaaattaaagtgcctgaagcataattcattctttacctgtatactaaaaaccctgttgtattgatttttttataataagcctttttacctctgtgtaaaaaatatatatacaagtgtatgatgtacattttagttcttaacttttttttatggtttctaatatgtatgaccaatgtagccattgctttaaaatgtaccgtgtaaatataaacacatcctatcagaaaagaaaaaatcnagaacgaa

SEQ ID NO: 213 - protein, 418 aa, Homo sapiens
MTEETHPDDDSYIVRVKAVVMTRDDSSGGWFPQEGGGISRVGVCKVMHPEGNGRSGFLIHGERQKDKLVVLECYVRKDLVYTKANPTFHHWKVDNRKFGLTFQSPADARAFDRGVRKAIEDLIEGSTTSSSTIHNEAELGDDDVFTTATDSSSNSSQKREQPTRTISSPTSCEHRRIYTLGHLHDSYPTDHYHLDQPMPRPCRQVSFPDDDEEIVRINPREKIWMTGYEDYRHAPVRGKYPDPSEDADSSYVRFAKGEVPKHDYNYPYVDSSDFGLGEDPKGRGGSVIKTQPSRGKSRRRKEDGERSRCVYCRDMFNHEENRRGHCQDAPDSVRTCIRRVSCMWCADSMLYHCMSDPEGDYTDPCSCDTSDEKFCLRWMALIALSFLAPCMCCYLPLRACYHCGVMCRCCGGKHKAAA

SEQ ID NO: 214 - DNA, 814 bp, Homo sapiens
  modified_base (63)..(63): a, c, t, g, unknown or other
  modified_base (126)..(126): a, c, t, g, unknown or other
  modified_base (128)..(128): a, c, t, g, unknown or other
  modified_base (144)..(144): a, c, t, g, unknown or other
  modified_base (184)..(184): a, c, t, g, unknown or other
  modified_base (204)..(204): a, c, t, g, unknown or other
  modified_base (297)..(297): a, c, t, g, unknown or other
atttcagcacaccaaagaaaattgagctggcaaaagatgaatctttcacaagcagtgatgatnatgaaaatgtagatttagataaaagacttcaatattatagatatccgtggtcaactgtgcatnancctgcaaggagaccantatccatctccagagactggcatggatataagaagaaganccatactattagtgtagganaagacattaattgtgacgtgatgattcacagagacgacaagtatagtatagtgagggccccttctccatgctggataatggtgaagcaagacncatgtaagctcttcctcctctacctcctctacctcagatgcattttggctgggagattgtgcccaagttgtatagagggtaaagcccaactggtatcaaaggttggttagctaatctgtggtcatatgagcatttatcttgcagacacccaagttttgtgcctcaccaggcacaagtttgctgtacttatcaacggtctgtctgtagactcaccaattctcttctcttatgactgcgttataaagcctttagagatgttcttcaacaggattatctaaagacttccttgggttcttgcaggcctcacaaatcttattttcagaataagaccctcctttttgagaagaatttctttcttttagaaaatgccgtagagaaatccaatatcagaatgtctgaacatagtagagaatgtcactttatgtaaacactacatttttctttaaatatttagtttctctcttttttttggtaaacttcaagtactataattaaaataactaagagacataaaaaa

SEQ ID NO: 215 - protein, 202 aa, Homo sapiens
MAEGEEEGGDVLISVGHANVLGYTLREFLQLLQHITIGTVLQIKVYRDFINIPEEWQEIYDLIPEAKFPVTSTPKKIELAKDESFTSSDDNENVDLDKRLQYYRYPWSTVHHPARRPISISRDWHGYKKKNHTISVGKDINCDVMIHRDDKKEVRAPSPYWIMVKQDNESSSSSTSSTSDAFWLEDCAQVEEGKAQLVSKVG

SEQ ID NO: 216 - DNA, 2337 bp, Homo sapiens
agcggaggcggcgcggggacgggcgctgggcggccgcggagctccgggtgccgccgcgtccccagcgccccggccggcccctctgggcggcctgcgggggcggcgcagttgcgaaactgagtgcctgtgtagatcatcctagaatacctgtgtggtgctgtccttcctcaagactacctcattctcactggctcggagactcctgcctgctgagctgactacacagacttagtcttctccactccgtgttcctgcagctagagacatgacctaacaccctgatgaccactctcagggaccttgagtgactggccggtgcaccatggaacttaaagtatgggtggatggagttcagaggattgtttgtggagtcactgaagtcacaacttgccaggaggttgtcatagccttagctcaagcaataggtcgaactggaaggtacacccttatagagaaatggagagatactgaaagacacttagcacctcatgaaaatcctatcatatccttaaacaaatgggggcagtatgctagtgatgtgcagctcattctacgacgaactgggccgtctctcagtgagcgacccacttcagacagtgtggctcgaattcctgaaagaactttatacaggcagagtctgccccccttagctaaactgaggcctcagattgacaaatcaatcaaaaggagggaaccgaaaaggaaatcactgacatttacaggaggtgccaaaggattaatggacatttttggaaaaggtaaagaaactgagtttaagcaaaaggtgctgaataactgcaaaacaacagcagatgagttgaagaagctaatccgtctgcagacagagaagcttcaatccattgagaaacagctggaatctaatgaaatagaaataagattttgggagcaaaagtataattccaaccttgaagaggaaattgtccgtctagagcaaaagatcaaaagaaacgatgtagaaattgaggaggaagaattctgggaaaatgaattacagattgaacaggaaaatgaaaaacagctgaaggatcaacttcaagaaataagacagaaaataacagaatgtgaaaacaaattaaaggactatttggcacagatccggactatggaaagtggtcttgaagcagaaaaattgcaacgggaagttcaagaggcacaggtcaatgaggaagaggttaaaggaaagatcggtaaggtcaaaggggagattgacattcaaggccagcagagtctgaggttggaaaatggcatcaaagctgtggaaagatctcttggacaagccaccaaacgcttacaggacaaagaacaggaactggagcagttgactaaggagttgcggcaagtcaatctccagcagttcatccagcagacagggacaaaagttaccgttttgccagcggagcccattgaaatagaggcctcacatgcagacattgaaagggggatcatcattctttctgataagcaggagtgtaaagattagatatcacaccaaaagctcaggcaagaaaagcaaaaatgaacaagtgggactacattaaacccaaaactcctgcacaacaaaggaaacgatcaccaaaatgaaaaggtggactgtagattgggagaaaatatttgcaaaccgttatctggtaggggtttaatatccaaactatataaggaactcacagaacttaaagaaaacaaataatccaattaaaaatggtcaaaggggctgggcatggtggctcacgcctgtaatctcagcactttgggaggccgaggtgggagaatcacaaggtcaggagactgagaccatcctggctaacaccatgatgggctaacacccatctctactaaaaatacgaaacattagccaggtgtggtggcacgcgcctgtaatcccagctactcgggaggctgaggcagaaggattgcttgaacccgggaggtggaggttgcagtgagccgagatcgcattactgcactccagcctgggtaacagagtgagactccatctcaaaaaaaaaaaaaaaatagatatttttccaaagaagacataaaaacagccaacaggtatatgaaaaagtgctcaacatcactgatcagcagggaaatgcaaatcaaagccacaatgagataccacctcacacctgttaggttacatctgctattgtcaaaaagataagagatagcaagtgtcagcaagggtctggagaaaagggaatttttgtatactgttggtgggaatgtaaatcagtacggctattgtggaaaacagtgtagaggtttctcaaaaaattaaaactatcatacaacccagcaaaaaaaaaaaaaaaa

SEQ ID NO: 217 - protein, 392 aa, Homo sapiens
MELKVWVDGVQRIVCGVTEVTTCQEVVIALAQAIGRTGRYTLIEKWRDTERHLAPHENPIISLNKWGQYASDVQLILRRTGPSLSERPTSDSVARIPERTLYRQSLPPLAKLRPQIDKSIKRREPKRKSLTFTGGAKGLMDIFGKGKETEFKQKVLNNCKTTADELKKLIRLQTEKLQSIEKQLESNEIEIRFWEQKYNSNLEEEIVRLEQKIKRNDVEIEEEEFWENELQIEQENEKQLKDQLQEIRQKITECENKLKDYLAQIRTMESGLEAEKLQREVQEAQVNEEEVKGKIGKVKGEIDIQGQQSLRLENGIKAVERSLGQATKRLQDKEQELEQLTKELRQVNLQQFIQQTGTKVTVLPAEPIEIEASHADIERGIIILSDKQECKD

SEQ ID NO: 218 - DNA, 7604 bp, Homo sapiens
cgtgagtgtctgtgcgttttgatcccgaagctcctcgccgggtcgttacttcagaagagaagacagtgagcgtgggcgaggcgaggcatccagaggccccggcgacccctgctccccagtcctccgccccctcgcgtcgcggccctgggcgggcgccgcgagccggagttccattttaattgctgttaatcatttcagagaagaacactgaactttgaaaaaaatgttggaagccattgacaaaaatcgggccctgcatgcagcagagcgcttgcaaaccaagctgcgagaacgtggggatgtagcaaatgaagacaaactgagccttctgaagtcagtcctgcagagccctctcttcagtcagattctgagccttcagacttctgtacagcagctgaaagaccaggtaaatattgcaacttcagcaacttcaaatattgaatatgcccacgttcctcatctcagcccagctgtgattcctactctgcaaaatgaatcgtttttattatccccaaacaatgggaatctggaagcacttacaggacctggtattccacacattaatgggaaacctgcttgtgatgaatttgatcagcttatcaaaaatatggcccagggtcgccatgtagaagtttttgagctcctcaaacctccatctggaggccttgggtttagtgttgtgggactaagaagtgaaaacagaggagagctgggaatatttgttcaagagatacaagagggcagtgtggcccatagagatggaagattgaaagaaactgatcaaattcttgctatcaatggacaggctcttgatcagacaattacacatcagcaggctatcagcatcctgcagaaagccaaagatactgtccagctagttattgccagaggctcattgcctcagcttgtcagccccatagtttcccgttctccatctgcagccagcacaatttcagctcactctaatccggttcactggcaacacatggaaacgattgaattggtgaatgatggatctggtttgggatttggcatcataggaggaaaagcaactggtgtgatagtaaaaaccattctgcctggaggagtagctgatcagcatgggcgtttatgcagtggagaccacattctaaagattggtgacacagatctagcaggaatgagcagtgagcaagtagcacaagtccttaggcaatgtggaaatagagttaagttgatgattgcaagaggtgccatagaagaacgtacagcacccactgctttgggcatcaccctctcctcatccccaacttcaacaccagagttgcgggttgatgcttctactcagaaaggtgaagaaagtgagacatttgatgtagaactcactaaaaatgtccaaggattaggaattaccattgctggctacattggagataaaaaattggaaccttcaggaatctttgtaaagagcattacaaaaagcagtgccgttgagcatgatggaagaatccaaattggagaccaaattatagcagtagatggcacaaaccttcagggttttactaatcagcaagcagtagaggtattgcgacatacaggacaaactgtgctcctgacactaatgaggagaggaatgaagcaggaagccgagctcatgtcaagggaagacgtcacaaaagatgcagatttgtctcctgttaatgccagcataatcaaagaaaattatgaaaaagatgaagattttttatcttcgacgagaaacaccaacatattaccaactgaagaagaagggtatccattactgtcagctgagatagaagaaatagaagatgcacaaaaacaagaagctgctctgctgacaaaatggcaaaggattatgggaattaactatgaaatagtggtggcccatgtgagcaagtttagtgagaacagtggattggggataagcctggaagcgacagtgggacatcattttatccgatctgttctaccagagggtcctgttggacacagcgggaagctcttcagtggagacgagctattggaagtaaatggcataactttacttggggaaaatcaccaagatgtggtgaatatcttaaaagaactgcctatagaagtgacaatggtgtgctgtcgtcgaactgtgccacccaccacccaatcagaattggatagcctggacttatgtgatattgagctaacagaaaagcctcacgtagatctaggtgagttcatcgggtcatcagagacagaggatccagtgctggcgatgactgatgcgggtcagagtacagaagaggttcaagcacctttggccatgtgggaggctggcattcagcacatagagctggagaaagggagcaaaggacttggttttagcattttagattatcaggatccaattgatccagcaagcactgtgattataattcgttctttggtgcctggcggcattgctgaaaaggatggacgacttcttcctggtgaccgactcatgtttgtaaacgatgttaacttggaaaacagcagtcttgaggaagctgtagaagcactgaagggagcaccgtcagggactgtgagaataggagttgctaagcctttacccctttcaccagaagaaggttatgtttctgctaaggaggattcctttctctacccaccacactcctgtgaggaagcagggctggctgacaaacccctcttcagggctgacttggctctggtgggcacaaatgatgctgacttagtagatgaatccacatttgagtctccatactctcctgaaaatgacagcatctactctactcaagcctctattttatctcttcatggcagttcttgtggtgatggcctgaactatggttcttcccttccatcatctcctcctaaggatgttattgaaaattcttgtgatccagtacttgatctgcatatgtctctggaggaactatatacccagaatctcctgcaaagacaggatgagaatacaccttcggtggacataagtatggggcctgcttctggctttactataaatgactacacacctgcaaatgctattgaacaacaatatgaatgtgaaaacacaatagtgtggactgaatctcatttaccaagtgaagttatatcaagtgcagaacttccttctgtgctacccgattcagctggaaagggctctgagtacctgcttgaacagagctccctggcctgtaatgctgagtgtgtcatgcttcaaaatgtatctaaagaatcttttgaaaggactattaatatagcaaaaggcaattctagcctaggaatgacagttagtgctaataaagatggcttggggatgatcgttcgaagcattattcatggaggtgccattagtcgagatggccggattgccattggggactgcatcttgtccattaatgaagagtctaccatcagtgtaaccaatgcccaggcacgagctatgttgagaagacattctctcattggccctgacataaaaattacttatgtgcctgcagaacatttggaagagttcaaaataagcttgggacaacaatctggaagagtaatggcactggatattttttcttcatacactggcagagacattccagaattaccagagcgagaagagggagagggtgaagaaagcgaacttcaaaacacagcatatagcaattggaatcagcccaggcgggtggaactctggagagaaccaagcaaatccttaggcatcagcattgttggtggacgagggatggggagtcggctaagcaatggagaagtgatgaggggcattttcatcaaacatgttctggaagatagtccagctggcaaaaatggaaccttgaaacctggagatagaatcgtagaggtggatggaatggacctcagagatgcaagccatgaacaagctgtggaagccattcggaaagcaggcaaccctgtagtctttatggtacagagcattataaacagaccaaggaaatcccctttgccttccttgctgcacaacctttaccctaagtacaacttcagcagcactaacccatttgctgactctctacaaatcaacgccgacaaggcacccagtcagtcagagtcagagccagagaaggctccattgtgcagtgtgcccccaccccctccttcagcctttgccgaaatgggtagtgatcacacacagtcatctgcaagcaaaatctcacaagatgtggacaaagaggatgagtttggttacagctggaaaaatatcagagagcgttatggaaccctaacaggcgagctgcatatgattgaactggagaaaggtcatagtggtttgggcctaagtcttgctgggaacaaagaccgatccaggatgagtgtcttcatagtggggattgatccaaatggagctgcaggaaaagatggtcgattgcaaattgcagatgagcttctagagatcaatggtcagattttatatggaagaagtcatcagaatgcctcatcaatcattaaatgtgccccttctaaagtgaaaataatttttatcagaaataaagatgcagtgaatcagatggccgtatgtcctggaaatgcagtagaacctttgccttctaactcagaaaatcttcaaaataaggagacagagccaactgttactacttctgatgcagctgtggacctcagttcatttaaaaatgtgcaacatctggagcttcccaaggatcaggggggtttgggtattgctatcagcgaagaagatacactcagtggagtcatcataaagagcttaacagagcatggggtagcagccacggatggacgactcaaagtcggagatcagatactggctgtagatgatgaaattgttgttggttaccctattgaaaagtttattagccttctgaagacagcaaagatgacagtaaaacttaccatccatgctgagaatccagattcccaggctgttccttcagcagctggtgcagccagtggagaaaaaaagaacagctcccagtctctgatggtcccacagtctggctccccagaaccggagtccatccgaaatacaagcagatcatcaacaccagcaatttttgcttctgatcctgcaacctgccccattatccctggctgcgaaacaaccatcgagatttccaaagggcgaacagggctgggcctgagcatcgttgggggttcagacacgctgctgggtgccattattatccatgaagtttatgaagaaggagcagcatgtaaagatggaagactctgggctggagatcagatcttagaggtgaatggaattgacttgagaaaggccacacatgatgaagcaatcaatgtcctgagacagacgccacagagagtgcgcctgacactctacagagatgaggccccatacaaagaggaggaagtgtgtgacaccctcactattgagctgcagaagaagccgggaaaaggcctaggattaagtattgttggtaaaagaaacgatactggagtatttgtgtcagacattgtcaaaggaggaattgcagatgccgatggaagactgatgcagggagaccagatattaatggtgaatggggaagacgttcgtaatgccacccaagaagcggttgccgctttgctaaaggtgagtgaaggcagcctgtcatctttcacttttccactctctggatccagtacatctgagtcactggaaagtagctcaaagaagaatgcattggcatctgaaatacagggattaagaacagtcgaaatgaaaaagggccctactgactcactgggaatcagcatcgctggaggagtaggcagcccacttggtgatgtgcctatatttattgcaatgatgcacccaactggagttgcagcacagacccaaaaactcagagttggggataggattgtcaccatctgtggcacatccactgagggcatgactcacacccaagcagttaacctactgaaaaatgcatctggctccattgaaatgcaggtggttgctggaggagacgtgagtgtggtcacaggtcatcagcaggagcctgcaagttccagtctttctttcactgggctgacgtcaagcagtatatttcaggatgatttaggacctcctcaatgtaagtctattacactagagcgaggaccagatggcttaggcttcagtatagttggaggatatggcagccctcatggagacttacccatttatgttaaaacagtgtttgcaaagggagcagcctctgaagacggacgtctgaaaaggggcgatcagatcattgctgtcaatgggcagagtctagaaggagtcacccatgaagaagctgttgccatccttaaacggacaaaaggcactgtcactttgatggttctctcttgaattggctgccagaattgaaccaacccaacccctagctcacctcctactgtaaagagaatgcactggtcctgacaatttttatgctgtgttcagccgggtcttcaaaactgtaggggggaaataacacttaagtttctttttctcatctagaaatgctttccttactgacaacctaacatcatttttcttttcttcttgcattttgtgaacttaaagagaaggaatatttgtgtaggtgaatctcgtttttatttgtggagatatctaatgttttgtagtcacatgggcaagaattattacatgctaagctggttagtataaagaaagataattctaaagctaaccaaagaaaatggcttcagtaagttaggatgaaaaatgaaaatataaaataaagaagaaaatctcggggagtttaaaaaaaatgcctcaatttggcaatctacctcctctccccaccccaaactaaaaaaagaaaaaaaggttttctaatgaaaatctttaaaaatactgtcagtattttaaaattttcaacagtattataaaaacattgcatctccccacctctaatatgcatatatatttttcctgctaaaattggtttctacaattgagtaaatggcaaatacatgaagcaatgtccctaaattttataaagaaattatatttaatgcacatttcaattttcattcttatttttgaccttttgtaaaatattttcatgttgctataagtaaatgatgatgccaccccatgttgactatggtttttctagaaagcaactatgctgctaaccatagaggaacatagaagggttccagaatctttagtgctggttttaacaaccgatgcaacattaaaaatgtgttagtgtgctgtgcaattggttttcaattcatattaatcttaatgacagagaacaatgtgttactaattattttggttgtatgccattagtaaattgatagaaaaattaaggggattaacataacttcatttcattgccttatattaacatcttataatacaatagtttaagactaagggaaacagatggagctgtttattgagacaactggtgaggaattatcatgtgttcattcccattttagagcgtgaaactcctacattagaatatataaagtcactttaaatatctatatttgtaacagaagtagtgtacagatattttattacagcatttttgtgtaaatgcagaattaaagtgaataaataagaattttcagtggtgcac

SEQ ID NO: 219 - protein, 2045 aa, Homo sapiens
TLKKMLEAIDKNRALHAAERLQTKLRERGDVANEDKLSLLKSVLQSPLFSQILSLQTSVQQLKDQVNIATSATSNIEYAHVPHLSPAVIPTLQNESFLLSPNNGNLEALTGPGIPHINGKPACDEFDQLIKNMAQGRHVEVFELLKPPSGGLGFSVVGLRSENRGELGIFVQEIQEGSVAHRDGRLKETDQILAINGQALDQTITHQQAISILQKAKDTVQLVIARGSLPQLVSPIVSRSPSAASTISAHSNPVHWQHMETIELVNDGSGLGFGIIGGKATGVIVKTILPGGVADQHGRLCSGDHILKIGDTDLAGMSSEQVAQVLRQCGNRVKLMIARGAIEERTAPTALGITLSSSPTSTPELRVDASTQKGEESETFDVELTKNVQGLGITIAGYIGDKKLEPSGIFVKSITKSSAVEHDGRIQIGDQIIAVDGTNLQGFTNQQAVEVLRHTGQTVLLTLMRRGMKQEAELMSREDVTKDADLSPVNASIIKENYEKDEDFLSSTRNTNILPTEEEGYPLLSAEIEEIEDAQKQEAALLTKWQRIMGINYEIVVAHVSKFSENSGLGISLEATVGHHFIRSVLPEGPVGHSGKLFSGDELLEVNGITLLGENHQDVVNILKELPIEVTMVCCRRTVPPTTQSELDSLDLCDIELTEKPHVDLGEFIGSSETEDPVLAMTDAGQSTEEVQAPLAMWEAGIQHIELEKGSKGLGFSILDYQDPIDPASTVIIIRSLVPGGIAEKDGRLLPGDRLMFVNDVNLENSSLEEAVEALKGAPSGTVRIGVAKPLPLSPEEGYVSAKEDSFLYPPHSCEEAGLADKPLFRADLALVGTNDADLVDESTFESPYSPENDSIYSTQASILSLHGSSCGDGLNYGSSLPSSPPKDVIENSCDPVLDLHMSLEELYTQNLLQRQDENTPSVDISMGPASGFTINDYTPANAIEQQYECENTIVWTESHLPSEVISSAELPSVLPDSAGKGSEYLLEQSSLACNAECVMLQNVSKESFERTINIAKGNSSLGMTVSANKDGLGMIVRSIIHGGAISRDGRIAIGDCILSINEESTISVTNAQARAMLRRHSLIGPDIKITYVPAEHLEEFKISLGQQSGRVMALDIFSSYTGRDIPELPEREEGEGEESELQNTAYSNWNQPRRVELWREPSKSLGISIVGGRGMGSRLSNGEVMRGIFIKHVLEDSPAGKNGTLKPGDRIVEVDGMDLRDASHEQAVEAIRKAGNPVVFMVQSIINRPRKSPLPSLLHNLYPKYNFSSTNPFADSLQINADKAPSQSESEPEKAPLCSVPPPPPSAFAEMGSDHTQSSASKISQDVDKEDEFGYSWKNIRERYGTLTGELHMIELEKGHSGLGLSLAGNKDRSRMSVFIVGIDPNGAAGKDGRLQIADELLEINGQILYGRSHQNASSIIKCAPSKVKIIFIRNKDAVNQMAVCPGNAVEPLPSNSENLQNKETEPTVTTSDAAVDLSSFKNVQHLELPKDQGGLGIAISEEDTLSGVIIKSLTEHGVAATDGRLKVGDQILAVDDEIVVGYPIEKFISLLKTAKMTVKLTIHAENPDSQAVPSAAGAASGEKKNSSQSLMVPQSGSPEPESIRNTSRSSTPAIFASDPATCPIIPGCETTIEISKGRTGLGLSIVGGSDTLLGAIIIHEVYEEGAACKDGRLWAGDQILEVNGIDLRKATHDEAINVLRQTPQRVRLTLYRDEAPYKEEEVCDTLTIELQKKPGKGLGLSIVGKRNDTGVFVSDIVKGGIADADGRLMQGDQILMVNGEDVRNATQEAVAALLKVSEGSLSSFTFPLSGSSTSESLESSSKKNALASEIQGLRTVEMKKGPTDSLGISIAGGVGSPLGDVPIFIAMMHPTGVAAQTQKLRVGDRIVTICGTSTEGMTHTQAVNLLKNASGSIEMQVVAGGDVSVVTGHQQEPASSSLSFTGLTSSSIFQDDLGPPQCKSITLERGPDGLGFSIVGGYGSPHGDLPIYVKTVFAKGAASEDGRLKRGDQIIAVNGQSLEGVTHEEAVAILKRTKGTVTLMVLS

SEQ ID NO: 220 - DNA, 1542 bp, Homo sapiens
ggaatttctacaatggtgggctcagctctcaggagaggtgcccatgcatatgtctacctggtgagtaaggccagtcacatctccagaggccatcagcaccaggcctggggatcgaggcctcctgcagcagagtgtgccacccaaagagctccaggcagtgtggtggagctgctgggcaaatcctaccctcaggacgaccacagcaacctcacccggaaggtcctcaccagagttggcaggaacctgcacaaccagcagcatcaccctctgtggctgatcaaggagagggtgaaggagcacttctacaagcagtatgtgggccgctttgggaccccgttgttctcggtctacgacaacctttctccagtggtcacgacctggcagaactttgacagcctgctcatcccagctgatcaccccagcaggaagaagggggacaactattacctgaatcggactcacatgctgagagcgcacacgtctgcacaccagtgggacttgctgcacgcgggactggatgccttcctggtggtgggtgatgtctacaggcgtgaccagatcgactcccagcactaccctattttccaccagctggaggccgtgcggctcttctccaagcatgagttatttgctggtataaaggatggagaaagcctgcagctctttgaacaaagttctcgctctgcgcataaacaagagacacacaccatggaggccgtgaagcttgtagagtttgatcttaagcaaacgcttaccaggctcatggcacatctttttggagatgagctggagataagatgggtagactgctacttcccttttacacatccttcctttgagatggagatcaactttcatggagaatggctggaagttcttggctgcggggtgatggaacaacaactggtcaattcagctggtgctcaagaccgaatcggctgggcttttggcctaggattagaaaggctagccatgatcctctacgacatccctgatatccgtctcttctggtgtgaggacgagcgcttcctgaagcagttctgtgtatccaacattaatcagaaggtgaagtttcagcctcttagcaaatatccggctgtgatcaatgatatttcattctggttgccctctgagaattacgcagaaaatgatttctatgacttagtccgaacaattggaggagacctggtggaaaaggttgatctcatagacaagtttgtacatccaaagacgcacaagaccagccactgctaccgcatcacgtaccgccacatggaacggactctgtcccagagagaggtcaggcacatccaccaggccttgcaggaggctgcagtccagctgttgggtgtggagggcaggttctgatgtcaccacttcactcaggctgcagccctcttggggctccaggatttgctgaaagagaaaaagatatggtttgtgaactggggcatcaatcatcttttgataaatggatcagttttaggactttcagaaaataaaagatcgctcttgaaaaaaaaaaaaaaaaaaaaaaaaaaa

SEQ ID NO: 221 - protein, 451 aa, Homo sapiens
MVGSALRRGAHAYVYLVSKASHISRGHQHQAWGSRPPAAECATQRAPGSVVELLGKSYPQDDHSNLTRKVLTRVGRNLHNQQHHPLWLIKERVKEHFYKQYVGRFGTPLFSVYDNLSPVVTTWQNFDSLLIPADHPSRKKGDNYYLNRTHMLRAHTSAHQWDLLHAGLDAFLVVGDVYRRDQIDSQHYPIFHQLEAVRLFSKHELFAGIKDGESLQLFEQSSRSAHKQETHTMEAVKLVEFDLKQTLTRLMAHLFGDELEIRWVDCYFPFTHPSFEMEINFHGEWLEVLGCGVMEQQLVNSAGAQDRIGWAFGLGLERLAMILYDIPDIRLFWCEDERFLKQFCVSNINQKVKFQPLSKYPAVINDISFWLPSENYAENDFYDLVRTIGGDLVEKVDLIDKFVHPKTHKTSHCYRITYRHMERTLSQREVRHIHQALQEAAVQLLGVEGRF

SEQ ID NO: 222 - DNA, 1883 bp, Homo sapiens
tgaaggctggttgttcagactgagcttcctgcctgcctgtaccccgccaacagcttcagaagaaggtgactggtggctgcctgaggaataccagtgggcaagagaattagcatttctggagcatctgctgtctgagcagcccctgggtgcgtccactttctgggcacgtgaggttgggccttggccgcctgagcccttgagttggtcacttgaaccttgggaatattgagattatattctcctgccttttaaaaagatggacttcagcagaaatctttatgatattggggaacaactggacagtgaagatctggcctccctcaagttcctgagcctggactacattccgcaaaggaagcaagaacccatcaaggatgccttgatgttattccagagactccaggaaaagagaatgttggaggaaagcaatctgtccttcctgaaggagctgctcttccgaattaatagactggatttgctgattacctacctaaacactagaaaggaggagatggaaagggaacttcagacaccaggcagggctcaaatttctgcctacaggttccacttctgccgcatgagctgggctgaagcaaacagccagtgccagacacagtctgtacctttctggcggagggtcgatcatctattaataagggtcatgctctatcagatttcagaagaagtgagcagatcagaattgaggtcttttaagtttcttttgcaagaggaaatctccaaatgcaaactggatgatgacatgaacctgctggatattttcatagagatggagaagagggtcatcctgggagaaggaaagttggacatcctgaaaagagtctgtgcccaaatcaacaagagcctgctgaagataatcaacgactatgaagaattcagcaaaggggaggagttgtgtggggtaatgacaatctcggactctccaagagaacaggatagtgaatcacagactttggacaaagtttaccaaatgaaaagcaaacctcggggatactgtctgatcatcaacaatcacaattttgcaaaagcacgggagaaagtgcccaaacttcacagcattagggacaggaatggaacacacttggatgcaggggctttgaccacgacctttgaagagcttcattttgagatcaagccccaccatgactgcacagtagagcaaatctatgagattttgaaaatctaccaactcatggaccacagtaacatggactgcttcatctgctgtatcctctcccatggagacaagggcatcatctatggcactgatggacaggaggcccccatctatgagctgacatctcagttcactggtttgaagtgcccttcccttgctggaaaacccaaagtgttttttattcaggcttgtcagggggataactaccagaaaggtatacctgttgagactgattcagaggagcaaccctatttagaaatggatttatcatcacctcaaacgagatatatcccggatgaggctgactttctgctggggatggccactgtgaataactgtgtttcctaccgaaaccctgcagagggaacctggtacatccagtcactttgccagagcctgagagagcgatgtcctcgaggcgatgatattctcaccatcctgactgaagtgaactatgaagtaagcaacaaggatgacaagaaaaacatggggaaacagatgcctcagcctactttcacactaagaaaaaaacttgtcttcccttctgattgatggtgctattttgtttgttttgttttgttttgtttttttgagacagaatctcgctctgtcgcccaggctggagtgcagtggcgtgatctcggctcaccgcaagctccgcctcccgggttcaggccattctcctgct

SEQ ID NO: 223 - protein, 496 aa, Homo sapiens
MDFSRNLYDIGEQLDSEDLASLKFLSLDYIPQRKQEPIKDALMLFQRLQEKRMLEESNLSFLKELLFRINRLDLLITYLNTRKEEMERELQTPGRAQISAYRFHFCRMSWAEANSQCQTQSVPFWRRVDHLLIRVMLYQISEEVSRSELRSFKFLLQEEISKCKLDDDMNLLDIFIEMEKRVILGEGKLDILKRVCAQINKSLLKIINDYEEFSKGEELCGVMTISDSPREQDSESQTLDKVYQMKSKPRGYCLIINNHNFAKAREKVPKLHSIRDRNGTHLDAGALTTTFEELHFEIKPHDDCTVEQIYEILKIYQLMDHSNMDCFICCILSHGDKGIIYGTDGQEAPIYELTSQFTGLKCPSLAGKPKVFFIQACQGDNYQKGIPVETDSEEQPYLEMDLSSPQTRYIPDEADFLLGMATVNNCVSYRNPAEGTWYIQSLCQSLRERCPRGDDILTILTEVNYEVSNKDDKKNMGKQMPQPTFTLRKKLVFPSD

SEQ ID NO: 224 - DNA, 3547 bp, Homo sapiens
gcactcgcccggctcgcccgctttcgcacccagttcacgcgccacagctatgtgtccccgagccgcgcgggcgcccgcgacgctactcctcgccctgggcgcggtgctgtggcctgcggctggcgcctgggagcttacgattttgcacaccaacgacgtgcacagccggctggagcagaccagcgaggactccagcaagtgcgtcaacgccagccgctgcatgggtggcgtggctcggctcttcaccaaggttcagcagatccgccgcgccgaacccaacgtgctgctgctggacgccggcgaccagtaccagggcactatctggttcaccgtgtacaagggcgccgaggtggcgcacttcatgaacgccctgcgctacgatgccatggcactgggaaatcatgaatttgataatggtgtggaaggactgatcgagccactcctcaaagaggccaaatttccaattctgagtgcaaacattaaagcaaaggggccactagcatctcaaatatcaggactttatttgccatataaagttcttcctgttggtgatgaagttgtgggaatcgttggatacacttccaaagaaaccccttttctctcaaatccagggacaaatttagtgtttgaagatgaaatcactgcattacaacctgaagtagataagttaaaaactctaaatgtgaacaaaattattgcactgggacattcgggttttgaaatggataaactcatcgctcagaaagtgaggggtgtggacgtcgtggtgggaggacactccaacacatttctttacacaggcaatccaccttccaaagaggtgcctgctgggaagtacccattcatagtcacttctgatgatgggcggaaggttcctgtagtccaggcctatgcttttggcaaatacctaggctatctgaagatcgagtttgatgaaagaggaaacgtcatctcttcccatggaaatcccattcttctaaacagcagcattcctgaagatccaagcataaaagcagacattaacaaatggaggataaaattggataattattctacccaggaattagggaaaacaattgtctatctggatggctcctctcaatcatgccgctttagagaatgcaacatgggcaacctgatttgtgatgcaatgattaacaacaacctgagacacacggatgaaatgttctggaaccacgtatccatgtgcattttaaatggaggtggtatccggtcgcccattgatgaacgcaacaatggcacaattacctgggagaacctggctgctgtattgccctttggaggcacatttgacctagtccagttaaaaggttccaccctgaagaaggcctttgagcatagcgtgcaccgctacggccagtccactggagagttcctgcaggtgggcggaatccatgtggtgtatgatctttcccgaaaacctggagacagagtagtcaaattagatgttctttgcaccaagtgtcgagtgcccagttatgaccctctcaaaatggacgaggtatataaggtgatcctcccaaacttcctggccaatggtggagatgggttccagatgataaaagatgaattattaagacatgactctggtgaccaagatatcaacgtggtttctacatatatctccaaaatgaaagtaatttatccagcagttgaaggtcggatcaagttttccacaggaagtcactgccatggaagcttttctttaatatttctttcactttgggcagtgatctttgttttataccaatagccaaaaattctccttgcctttaatgtgtgaaactgcattttttcaagtgagattcaaatctgccttttaggacctggctttgtgacagcaaaaaccatctttacaggctcctagaagctgaaggttagagcattataaaatgaagagacagacatgattactcagggtcagcaacctagtgagttagaaaaaaaattaacatagggccctataaggagaaagccaactatgttaagtttacgtgtccaaattttaatgaaattttactaacaattttaaaccatatttttcttcttcatatccatttctaatccatcaaacagcttatgtttacataaaattttatcattcacaaggaagttttaagcacactgtctcatttgatatccacaacttatttttggtaggaaagagagatgtttttcccacctgtcagatgaaaaaactgaagctcaaaaagggttgacttgaccatacagctaatgctgacagatccaagacctagacctaggtcttttgaactcaagtccagcattctcaactatatcaagttactgttcagaatacttaatatctcctctcttcataattatcaatagccccaagctcatggatgacaaatctctgctttatttcttgtctctattttttcactttatagctcctgttataatagcaagtttaatggtataaacacaggataccatcctctcttgcaacacccatgtgcctttgatgagtcaggtagcaagctgtagtagataatgagaaaggccagaggctgcaaagacagtcaaaggacacgagagaaaggaaggggaagaacaggactccaggactgttttatattatagaaaagcaagagctaaagagcatttacacatgttaaacagatacttgttaagcatagtgcctgacacacggcattagctgttattttatgagattccatcagctctgcctctgtcctctttcttctaacatgaaggtatcatgagaagagaaccttctaacataagctgtaattctaaacctgcacttgtccctctccagcaagaggctagcactgaattcattctactcatactacacacccagttatggaatgtccagagttctcgaagaaaataaatgactttaggaagaggtatacattttttaagtcgctctgcctccaaatctgaacagtcactgtaaatcattcttaagcccagatatgagaacttctgctggaaagtgggaccctctgagtgggtggtcagaaaatacccatgctgatgaaatgacctatgcccaaagaacaaatacttaacgtgggagtggaaccacatgagcctgctcagctctgcataagtaattcaagaaatgggaggcttcaccttaaaaacagtgtgcaaatggcagctagaggttttgataggaagtatgtttgtttcttagtgtttacaaatattaagtactcttgatacaaaatatacttttaaacttcataacctttttataaaagttgttgcagcaaaataatagcctcggttctatgcatatatggattgctataaaaaatgtcaataagattgtacaaggaaaattagagaaagtcacatttagggtttattttttacacttggccagtaaaatagggtaaatcctattagaaattttttaaagaactttttttaagtttcctaaatctgtgtgtgtattgtgaagtggtataagaaatgactttgaaccactttgcaattgtagattcccaacaataaaattgaagat

SEQ ID NO: 225 - protein, 574 aa, Homo sapiens
MCPRAARAPATLLLALGAVLWPAAGAWELTILHTNDVHSRLEQTSEDSSKCVNASRCMGGVARLFTKVQQIRRAEPNVLLLDAGDQYQGTIWFTVYKGAEVAHFMNALRYDAMALGNHEFDNGVEGLIEPLLKEAKFPILSANIKAKGPLASQISGLYLPYKVLPVGDEVVGIVGYTSKETPFLSNPGTNLVFEDEITALQPEVDKLKTLNVNKIIALGHSGFEMDKLIAQKVRGVDVVVGGHSNTFLYTGNPPSKEVPAGKYPFIVTSDDGRKVPVVQAYAFGKYLGYLKIEFDERGNVISSHGNPILLNSSIPEDPSIKADINKWRIKLDNYSTQELGKTIVYLDGSSQSCRFRECNMGNLICDAMINNNLRHTDEMFWNHVSMCILNGGGIRSPIDERNNGTITWENLAAVLPFGGTFDLVQLKGSTLKKAFEHSVHRYGQSTGEFLQVGGIHVVYDLSRKPGDRVVKLDVLCTKCRVPSYDPLKMDEVYKVILPNFLANGGDGFQMIKDELLRHDSGDQDINVVSTYISKMKVIYPAVEGRIKFSTGSHCHGSFSLIFLSLWAVIFVLYQ

SEQ ID NO: 226 - DNA, 2688 bp, Homo sapiens
  modified_base (2675)..(2676): a, c, t, g, unknown or other
aagcttgcgcgccatgtaaggtaaagtgactgattctatagcaatccaattgttcctttgtctgcccgtttacatataacaatgttgtcaatgtttgattgaaaatacctagcaggcgacacacacacacctagctcctcaggcggagagcacccctttcttggccacccgggtatcccccagggagtacggggctcaaaacacccttttggagaacaaggtggaagcaaatttcaggaagtaaaacttcctgaaataaaataaaatatcgaatgccttgagacccatacattttcaggttttcctaattaaagcaattactttccaccacccctccaacctggaatcaccaacttggttagagaaactgatttttcttttttctttttttttcccaaaagagtacatctgatcattttagcctgcaactaatgatagagatattagggctagttaaccacagttttacaagactcctctcccgcgtgtgggccattgtcatgctgtcggtcccgcccacctgaaaggtctccccgccccgactggggtttgttgttgaagaaggagaatccccggaaaggctgagtctccagctcaaggtcaaaacgtccaaggccgaaagccctccagtttcccctggacaccttgctcctgcttctgctacgaccttctgggaacgcgaatttctcattttcttcttaaattgccattttcgctttaggagatgaatgttttcctttggctgttttggcaatgactctgaattaaagcgatgctaacgcctcttttccccctaattgttaaaagctatggactgcaggaagatggtccgcttctcttacagtgtgatttggatcatggccatttctaaagcctttgaactgggattagttgccgggctgggccatcaggaatttgctcgtccatctcggggagacctggccttcagagatgacagcatttggccccaggaggagcctgcaattcggcctcggtcttcccagcgtgtgctgcccatgggaatacagcacagtaaggagctaaacagaacctgctgcctgaatgggggaacctgcatgctggagtccttttgtgcctgccctccctccttctacggacggaactgtgagcacgatgtgcgcaaagagaactgtgggtctgtgccccatgacacctggctgcccaagaagtgttccctgtgtaaatgctggcacggtcagctccgctgctttcctcaggcatttctacccggctgtgatggccttgtgatggatgagcacctcgtggcttccaggactccagaactaccaccgtctgcacgtactaccacttttatgctagctggcatctgcctttctatacaaagctactattaatcgacattgacctatttccagaaatacaattttagatattatgcaaatttcatgacccgtaaaggctgctgctacaatgtcctaactgaaagatgatcatttgtagttgccttaaaataatgaatacaatttccaaaacggtctctaacatttccttacagaactaactacttcttacctctttgccctgccctctcccaaaaaactacttcttttttcaaaagaaagtcagccatatctccattgtgcccaagtccagtgtttcttttttttttttgagacggagtctcactctgtcacccaggctggactgcaatgacgcgatctcggttcactgcaacctccgcatccggggttcaagccattctcctgcctcagcctcccaagtagctgggattacaggcatgtgtcaccatgccggctaatttttttgtattttagtagagacgggggtttcaccatattggccagctggtctcgaactctgaccttgtgatccatcgctcgcctctcgagtgctgagattacacacgtgagcaactgtgcaaggcctggtgtttcttgatacatgtaattctaccaaggtcttcttaatatgttcttttaaatgattgaattatacactcagattattggagactaagtctaatgtggaccttagaatacagttttgagtagagttgatcaaaatcaattaaaatagtctctttaaaaggaaagaaaacatctttaaggggaggaaccagagtgctgaaggaatggaagtccatctgcgtgtgtgcagggagactgggtaggaaagaggaagcaaatagaagagagaggttgaaaaacaaaatgggttacttgattggtgattaggtggtggtagagaagcaagtaaaaaggctaaatggaagggcaagtttccatcatctatagaaagctatgtaagacaaggactcccctttttttcccaaaggcattgtaaaaagaatgaagtctccttagaaaaaaaattatacctcaatgtccccaacaagattgcttaataaattgtgtttcctccaagctattcaattcttttaactgttgtagaagagaaaatgttcacaatatatttagttgtaaaccaagtgatcaaactacatattgtaaagcccatttttaaaatacattgtatatatgtgtatgcacagtaaaaatggaaactatattgacctaaaaaaaaaaaaaggaaaccacccttaggcaggcaggacatgctcttcagaactctgctcttcagagttccaaagaagggataaaacatcttttatnnccatcaaatagc

SEQ ID NO: 227 - DNA, 2403 bp, Homo sapiens
cggctcgagcggctcgagtgaagagcctctccacggctcctgcgcctgagacagctggcctgacctccaaatcatccatccacccctgctgtcatctgttttcatagtgtgagatcaacccacaggaatatccatggcttttgtgctcattttggttctcagtttctacgagctggtgtcaggacagtggcaagtcactggaccgggcaagtttgtccaggccttggtgggggaggacgccgtgttctcctgctccctctttcctgagaccagtgcagaggctatggaagtgcggttcttcaggaatcagttccatgctgtggtccacctctacagagatggggaagactgggaatctaagcagatgccacagtatcgagggagaactgagtttgtgaaggactccattgcaggggggcgtgtctctctaaggctaaaaaacatcactccctcggacatcggcctgtatgggtgctggttcagttcccagatttacgatgaggaggccacctgggagctgcgggtggcagcactgggctcacttcctctcatttccatcgtgggatatgttgacggaggtatccagttactctgcctgtcctcaggctggttcccccagcccacagccaagtggaaaggtccacaaggacaggatttgtcttcagactccagagcaaatgcagatgggtacagcctgtatgatgtggagatctccattatagtccaggaaaatgctgggagcatattgtgttccatccaccttgctgagcagagtcatgaggtggaatccaaggtattgataggagagacgtttttccagccctcaccttggcgcctggcttctattttactcgggttactctgtggtgccctgtgtggtgttgtcatggggatgataattgttttcttcaaatccaaagggaaaatccaggcggaactggactggagaagaaagcacggacaggcagaattgagagacgcccggaaacacgcagtggaggtgactctggatccagagacggctcacccgaagctctgcgtttctgatctgaaaactgtaacccatagaaaagctccccaggaggtgcctcactctgagaagagatttacaaggaagagtgtggtggcttctcagggtttccaagcagggagacattactgggaggtggacgtgggacaaaatgtagggtggtatgtgggagtgtgtcgggatgacgtagacagggggaagaacaatgtgactttgtctcccaacaatgggtattgggtcctcagactgacaacagaacatttgtatttcacattcaatccccattttatcagcctcccccccagcacccctcctacacgagtaggggtcttcctggactatgagggtgggaccatctccttcttcaatacaaatgaccagtcccttatttataccctgctgacatgtcagtttgaaggcttgttgagaccctatatccagcatgcgatgtatgacgaggaaaaggggactcccatattcatatgtccagtgtcctggggatgagacagagaagaccctgcttaaagggccccacaccacagacccagacacagccaagggagagtgctcccgacaggtggccccagcttcctctccggagcctgcgcacagagagtcacgccccccactctcctttagggagctgaggttcttctgccctgagccctgcagcagcggcagtcacagcttccagatgaggggggattggcctgaccctgtgggagtcagaagccatggctgccctgaagtggggacggaatagactcacattaggtttagtttgtgaaaactccatccagctaagcgatcttgaacaagtcacaacctcccaggctcctcatttgctagtcacggacagtgattcctgcctcacaggtgaagattaaagagacaacgaatgtgaatcatgcttgcaggtttgagggcacagtgtttgctaatgatgtgtttttatattatacattttcccaccataaactctgtttgcttattccacattaatttacttttctctataccaaatcacccatggaatagttattgaacacctgctttgtgaggctcaaagaataaagaggaggtaggatttttcactgattctataagcccagcattacctgataccaaaaccaggcaaagaaaacagaagaagaggaaggaaaactacaggtccatatccctcattaacacagacacaaaaattctaaataaaattttaacaaattaaactaaacaatatatttaaagatgatatataactactcagtgtggtttgtcccacaaatgcagagttggtttaatatttaaatatcaaccagtgtaattcagcacattaataaagtaaaaaagaaaaccataaaaaaaaaaaaaaa

SEQ ID NO: 228 - protein, 466 aa, Homo sapiens
MAFVLILVLSFYELVSGQWQVTGPGKFVQALVGEDAVFSCSLFPETSAEAMEVRFFRNQFHAVVHLYRDGEDWESKQMPQYRGRTEFVKDSIAGGRVSLRLKNITPSDIGLYGCWFSSQIYDEEATWELRVAALGSLPLISIVGYVDGGIQLLCLSSGWFPQPTAKWKGPQGQDLSSDSRANADGYSLYDVEISIIVQENAGSILCSIHLAEQSHEVESKVLIGETFFQPSPWRLASILLGLLCGALCGVVMGMIIVFFKSKGKIQAELDWRRKHGQAELRDARKHAVEVTLDPETAHPKLCVSDLKTVTHRKAPQEVPHSEKRFTRKSVVASQGFQAGKHYWEVDVGQNVGWYVGVCRDDVDRGKNNVTLSPNNGYWVLRLTTEHLYFTFNPHFISLPPSTPPTRVGVFLDYEGGTISFFNTNDQSLIYTLLTCQFEGLLRPYIQHAMYDEEKGTPIFICPVSWG

SEQ ID NO: 229 - DNA, 210 bp, Homo sapiens
atgaggatcttttactatctccattttctgtgttatgtgaccttcattctaccagccacatgtaccttggtgaatgctgatcgttgcaccaaacgttacggtcgttgtaaaagagactgtcttgagagtgaaaagcaaatagacatatgttccttaccaagaaaaatttgctgcactgagaaattgtatgaagaagatgatatgttttga

SEQ ID NO: 230 - protein, 69 aa, Homo sapiens
MRIFYYLHFLCYVTFILPATCTLVNADRCTKRYGRCKRDCLESEKQIDICSLPRKICCTEKLYEEDDMF

SEQ ID NO: 231 - DNA, 420 bp, Homo sapiens
  modified_base (36)..(36): a, c, t, g, unknown or other
ctcttgtcagctgtctttcagaagacctggtggggnaagtccgtgggcatcatgttgaccgagctggagaaagccttgaactctatcatcgacgtctaccacaagtactccctgataaaggggaatttccatgccgtctacagggatgacctgaagaaattgctagagaccgagtgtcctcagtatatcaggaaaaagggtgcagacgtctggttcaaagagttggatatcaacactgatggtgcagttaacttccaggagttcctcattctggtgataaagatgggctggcagcccacaaaaaaagccatgaagaaagccacaaagagtagctgagttactgcccagaggctgggcccctgacatgtacctgcagaataataaagtcatcaatacctcaaaaaaaaaaaaaaaaaaaaa

SEQ ID NO: 232 - protein, 94 aa, Homo sapiens
MLTELEKALNSIIDVYHKYSLIKGNFHAVYRDDLKKLLETECPQYIRKKGADVWFKELDINTDGAVNFQEFLILVIKMGWQPTKKAMKKATKSS

SEQ ID NO: 233 - DNA, 832 bp, Homo sapiens
gcactcccaaagaactgggtactcaacactgagcagatctgttctttgagctaaaaaccatgtgctgtaccaagagtttgctcctggctgctttgatgtcagtgctgctactccacctctgcggcgaatcagaagcagcaagcaactttgactgctgtcttggatacacagaccgtattcttcatcctaaatttattgtgggcttcacacggcagctggccaatgaaggctgtgacatcaatgctatcatctttcacacaaagaaaaagttgtctgtgtgcgcaaatccaaaacagacttgggtgaaatatattgtgcgtctcctcagtaaaaaagtcaagaacatgtaaaaactgtggcttttctggaatggaattggacatagcccaagaacagaaagaaccttgctggggttggaggtttcacttgcacatcatggagggtttagtgcttatctaatttgtgcctcactggacttgtccaattaatgaagttgattcatattgcatcatagtttgctttgtttaagcatcacattaaagttaaactgtattttatgttatttatagctgtaggttttctgtgtttagctatttaatactaattttccataagctattttggtttagtgcaaagtataaaattatatttgggggggaataagattatatggactttcttgcaagcaacaagctattttttaaaaaaaactatttaacattcttttgtttatattgttttgtctcctaaattgttgtaattgcattataaaataagaaaaatattaataagacaaatattgaaaataaagaaacaaaaagttcttctgtta

SEQ ID NO: 234 - protein, 96 aa, Homo sapiens; identical to SEQ ID NO: 16

SEQ ID NO: 235 - DNA, 20 bp, Artificial sequence
  source: /note="Description of artificial sequence: Synthetic probe"
ctttggccatggtgcggagg

SEQ ID NO: 236 - DNA, 29 bp, Artificial sequence
  source: /note="Description of artificial sequence: Synthetic probe"
tgtgttggtagtgctgtgttgaattacgg

SEQ ID NO: 237 - DNA, 22 bp, Artificial sequence
  source: /note="Description of artificial sequence: Synthetic probe"
tgtgtgaaatcagtggccgcct

SEQ ID NO: 238 - DNA, 24 bp, Artificial sequence
  source: /note="Description of artificial sequence: Synthetic probe"
cacttgccattgcagaaggtcctg

SEQ ID NO: 239 - DNA, 21 bp, Artificial sequence
  source: /note="Description of artificial sequence: Synthetic probe"
ggcattcaaatgggctgctgc

SEQ ID NO: 240 - DNA, 26 bp, Artificial sequence
  source: /note="Description of artificial sequence: Synthetic probe"
ctggacggatggtagcagtctaggga

SEQ ID NO: 241 - DNA, 26 bp, Artificial sequence
  source: /note="Description of artificial sequence: Synthetic probe"
tccctgataaaggggaatttccatgc

SEQ ID NO: 242 - DNA, 23 bp, Artificial sequence
  source: /note="Description of artificial sequence: Synthetic probe"
tggcagtttctgagcagtcgtgc

SEQ ID NO: 243 - DNA, 19 bp, Artificial sequence
  source: /note="Description of artificial sequence: Synthetic primer"
catcccttgctgccattct

SEQ ID NO: 244 - DNA, 20 bp, Artificial sequence
  source: /note="Description of artificial sequence: Synthetic primer"
gaccttgaactgaatcttgc

SEQ ID NO: 245 - protein, 46 aa, Homo sapiens
PPPSHDQRGSSGHTPPPSGPPNMAVGNMSVLLRSLPGETQFLNSSA

SEQ ID NO: 246 - protein, 46 aa, Mucaca mulatta
PPPSHDQGGSSGHTPPPSGPPNMAVGNMSVLLRSLPGETQFLNSSA

SEQ ID NO: 247 - protein, 46 aa, Mus musculus
PPLSHEQGDSSKNTPSPSGPPNMAVGNMSVLLGSLPGETQFLNSSA

SEQ ID NO: 248 - protein, 46 aa, Rattus norvegicus
PPPSHEQGDSSKNTPPPSGPPNMAVGNMSVLLGSLPGETQFLNSSA

SEQ ID NO: 249 - protein, 46 aa, Canis familiaris
PPPSHDQGDSSEHTPPPSGPPNMAVGNMSILLGSLPGETQFLNSSA

SEQ ID NO: 250 - protein, 46 aa, Bos taurus
PPPSHNQRDSSEHTPPPSGTPNMAVGNMSVLLGSLPGETQFLNSSA

SEQ ID NO: 251 - protein, 4 aa, Artificial sequence
  source: /note="Description of artificial sequence: Synthetic peptide"
DEAH

SEQ ID NO: 252 - DNA, 19 bp, Artificial sequence
  source: /note="Description of artificial sequence: Synthetic probe"
agcgatgccagagagaata

SEQ ID NO: 253 - DNA, 20 bp, Artificial sequence
  source: /note="Description of artificial sequence: Synthetic probe"
ggaagtgattggggtctttg

SEQ ID NO: 254 - DNA, 20 bp, Artificial sequence
  source: /note="Description of artificial sequence: Synthetic probe"
actcccagtcttgtcattgc

SEQ ID NO: 255 - DNA, 20 bp, Artificial sequence
  source: /note="Description of artificial sequence: Synthetic probe"
caagtttcaaccagcaagaa

SEQ ID NO: 256 - DNA, 19 bp, Artificial sequence
  source: /note="Description of artificial sequence: Synthetic probe"
gctacccgtgagtccctct

SEQ ID NO: 257 - DNA, 20 bp, Artificial sequence
  source: /note="Description of artificial sequence: Synthetic probe"
tcttgcactgctttggtttc

SEQ ID NO: 258 - DNA, 20 bp, Artificial sequence
  source: /note="Description of artificial sequence: Synthetic probe"
agagctttgggctcaacaag

SEQ ID NO: 259 - DNA, 20 bp, Artificial sequence
  source: /note="Description of artificial sequence: Synthetic probe"
atgacagtgcaggtcccata

SEQ ID NO: 260 - DNA, 20 bp, Artificial sequence
  source: /note="Description of artificial sequence: Synthetic probe"
aagggaacttgagcgtgaat

SEQ ID NO: 261 - DNA, 20 bp, Artificial sequence
  source: /note="Description of artificial sequence: Synthetic probe"
gagtgcttccccttctcttg

SEQ ID NO: 262 - DNA, 20 bp, Artificial sequence
  source: /note="Description of artificial sequence: Synthetic probe"
cacttcgatgaggatgaacg

SEQ ID NO: 263 - DNA, 20 bp, Artificial sequence
  source: /note="Description of artificial sequence: Synthetic probe"
gtcccatacccaaagaatgg

SEQ ID NO: 264 - DNA, 19 bp, Artificial sequence
  source: /note="Description of artificial sequence: Synthetic probe"
ttgaccgagctggagaaag

SEQ ID NO: 265 - DNA, 20 bp, Artificial sequence
  source: /note="Description of artificial sequence: Synthetic probe"
tcaggtcatccctgtagacg

SEQ ID NO: 266 - DNA, 20 bp, Artificial sequence
  source: /note="Description of artificial sequence: Synthetic probe"
agagccgctggtgtatcttt

SEQ ID NO: 267 - DNA, 20 bp, Artificial sequence
  source: /note="Description of artificial sequence: Synthetic probe"
ccttctgcaggacaatgaag

SEQ ID NO: 268 - DNA, 1257 bp, Homo sapiens
atgaccgaagaaacacacccagacgatgacagctatattgtgcgtgtcaaggctgtggttatgaccagagatgactccagcgggggatggttcccacaggaaggaggcgggatcagtcgcgtcggggtctgtaaggtcatgcaccccgaaggcaatggacgaagcggctttctcatccatggtgaacgacagaaagacaaactggtggtattggaatgctatgtaagaaaggacttggtctacaccaaagccaatccaacgtttcatcactggaaggtcgataataggaagtttggacttactttccaaagccctgctgatgcccgagcctttgacaggggagtaaggaaagcaatcgaagaccttatagaaggttcaacaacgtcatcttccaccatccataatgaagctgagcttggcgatgatgacgtttttacaacagctacagacagttcttctaattcctctcagaagagagagcaacctactcggacaatctcctctcccacatcctgtgagcaccggaggatttataccctgggccacctccacgactcataccccacagaccactatcacctcgatcagccgatgccaaggccctaccgccaggtgagcttcccggacgacgacgaggagatcgtgcgcatcaacccccgggagaagatctggatgacggggtacgaggattaccggcacgcacccgtcaggggcaagtacccggacccctcggaggacgcggactcctcctacgtgcgcttcgccaagggcgaggtccccaagcatgactacaactacccctacgtggactcctcagactttggcctaggcgaggaccccaaaggccgcgggggcagcgtgatcaagacgcagccctcccggggcaagtcgcggcggcggaaggaggacggagagcgctcgcggtgcgtgtactgcagggacatgttcaaccacgaggagaaccgccggggccactgccaggacgcgcccgactccgtgagaacttgcatccgccgggtgagctgcatgtggtgcgcggacagcatgctctatcactgtatgtcggaccccgagggagactatacagacccttgctcgtgcgatactagcgacgagaagttttgcctccggtggatggctcttattgccttgtctttcctggccccctgtatgtgctgttacctgccccttcgggcctgctaccactgcggagtgatgtgcaggtgctgtggcgggaagcacaaagcggccgcgtga

SEQ ID NO: 269 - DNA, 609 bp, Homo sapiens
atggcagaaggtgaagaggaaggaggtgatgttctgattagtgttggccatgccaatgtgttaggatatactcttcgagaatttttacagcttttgcaacatatcactattggaacagtgctacaaatcaaggtttaccgagattttattaacattcctgaagaatggcaagaaatatatgatttaatccctgaggccaaattcccagtaacaagcacaccaaagaaaattgagctggcaaaagatgaatctttcacaagcagtgatgataatgaaaatgtagatttagataaaagacttcaatattatagatatccgtggtcaactgtgcatcaccctgcaaggagaccaatatccatctccagagactggcatggatataagaagaagaaccatactattagtgtaggaaaagacattaattgtgacgtgatgattcacagagacgacaagaaagaagtgagggccccttctccatactggataatggtgaagcaagacaatgaaagctcttcctcctctacctcctctacctcagatgcattttggctggaagattgtgcccaagttgaagagggtaaagcccaactggtatcaaaggttggttag

What is claimed:

1. A method of diagnosing the presence of an inflammatory bowel disease (IBD) in a mammalian subject, comprising determining that the level of expression of a nucleic acid encoding a polypeptide shown as any one of SEQ ID NOS: 2, 4, 6, 8, 10, 12, 14, 16, 18, 20, 22, 24, 26, 28, 30, 32, 34, 36, 38, 40, 42, 44, 46, 48, 50, 52, 54, 56, 58, 60, 62, 64, 66, 68. 70, 72, 74, 76, 78, 80, 82, 84, 86, 88, 90, 92, 94, 96. 98, 100, 102, 104, 106, 110, 112, 114, 116, 118, 120, 122, 124, 126, 128, 130, 132, 134, 136, 138, 140, 142, 144, 146, 148, 150, 152, 154, 156, 158, 160, 162, 164, 166, 168, 170, 172, 194, 197, 199, 201, 203, 205, 207, and 230 in a test sample obtained from said subject is higher relative to the level of expression in a control, wherein said higher level of expression is indicative of the presence of an IBD in the subject from which the test sample was obtained.

2. A method of diagnosing the presence of an inflammatory bowel disease (IBD) in a mammalian subject, comprising determining that the level of expression of a nucleic acid encoding a polypeptide shown as any one of SEQ ID NOS: 108, 174, 176, 178, 180, 182, 184, 186, 188, 190, 192, 211, 213, 215, 217, 219, 221, 223, 225, and 228, in a test sample obtained from said subject is lower relative to the level of expression in a control, wherein said lower level of expression is indicative of the presence of an IBD in the subject from which the test sample was obtained.

3. The method of claim 1 or 2 wherein said mammalian subject is a human patient.

4. The method of claim 3 wherein evidence of said expression level is obtained by a method of gene expression profiling.

5. The method of claim 3 wherein said method is a PCR-based method.

6. The method of claim 4 wherein said expression levels are normalized relative to the expression levels of one or more reference genes, or their expression products.

7. The method of claim 1 or 2 comprising determining evidence of the expression levels of at least two of said genes, or their expression products.

8. The method of claim 1 or 2 comprising determining evidence of the expression levels of at least three of said genes, or their expression products.

9. The method of claim 1 or 2 comprising determining evidence of the expression levels of at least four of said genes, or their expression products.

10. The method of claim 1 or 2 comprising determining evidence of the expression levels of at least live of said genes, or their expression products.

11. The method of claim 1 or 2 further comprising the step of creating a report summarizing said IBD detection.

12. The method of claim 1 or 2, wherein said IBD is ulcerative colitis.

13. The method of claim 1 or 2, wherein said IBD is Crohn's disease.

14. The method of claim 1 or 2, wherein said IBD is ulcerative colitis and Crohn's disease.

15. The method of claim 1 or 2, wherein said test sample is from a colonic tissue biopsy.

16. The method of claim 15, wherein said biopsy is from a tissue selected from the group consisting of the terminal ileum, the ascending colon, the descending colon, and the sigmoid colon.

17. The method of claim 15, wherein said biopsy is from an inflamed colonic area.

18. The method of claim 15, wherein said biopsy is from a non-inflamed colonic area.

19. The method of claim 1 or 2, wherein said determining step is indicative of a recurrence of an IBD in said mammalian subject, and wherein said mammalian subject was previously diagnosed with an IBD and treated for said previously diagnosed IBD.

20. The method of claim 19, wherein said treatment comprised surgery.

21. The method of claim 1 or 2, wherein said determining step is indicative of a flare-up of said IBD in said mammalian subject.

22. A method of treating an inflammatory bowel disorder (IBD) in a mammalian subject in need thereof, the method comprising the steps of
(a) determining that the level of expression of a nucleic acid encoding a polypeptide shown as any one of SEQ ID NOS: 2, 4, 6, 8, 10, 12, 14, 16, 18, 20, 22, 24, 26. 28, 30, 32, 34, 36, 38, 40, 42, 44, 46, 48, 50, 52, 54, 56, 58, 60, 62, 64, 66, 68, 70, 72, 74, 76, 78, 80, 82, 84, 86, 88, 90, 92, 94, 96, 98, 100, 102, 104, 106, 110, 112, 114, 116, 118, 120, 122, 124, 126, 128, 130, 132, 134, 136, 138, 140, 142, 144, 146, 148, 150, 152, 154, 156, 158, 160, 162, 164, 166, 168, 170, 172, 194, 197, 199, 201, 203, 205, 207, and 230 in a test sample obtained from said subject is higher relative to the level of expression in a control, wherein said higher level of expression is indicative of the presence of an IBD in the subject from which the test sample was obtained; and
(b) administering to said subject an effective amount of an IBD therapeutic agent.

23. A method of treating an inflammatory bowel disorder (IBD) in a mammalian subject in need thereof, the method comprising the steps of
(a) determining that the level of expression of a nucleic acid encoding a polypeptide shown as any one of SEQ ID NOS: 108, 174, 176, 178, 180, 182, 184, 186, 188, 190, 192, 211, 213, 215, 217, 219, 221, 223, 225, and 228, in a lest sample obtained from said subject is lower relative to the level of expression in a control, wherein said lower level of expression is indicative of the presence of an IBD in the subject from which the test sample was obtained; and
(b) administering to said subject an effective amount of an IBD therapeutic agent.

24. The method of claim 22 or 23 wherein said mammalian subject is a human patient.

25. The method of claim 24 wherein evidence of said expression level is obtained by a method of gene expression profiling.

26. The method of claim 24 wherein said method is a PCR-based method.

27. The method of claim 25 wherein said expression levels are normalized relative to the expression levels of one or more reference genes, or their expression products.

28. The method of claim 22 or 23 comprising determining evidence of the expression levels of at least two of said genes, or their expression products.

29. The method of claim 22 or 23 comprising determining evidence of the expression levels of at least three of said genes, or their expression products.

30. The method of claim 22 or 23 comprising determining evidence of the expression levels of at least four of said genes, or their expression products.

31. The method of claim 22 or 23 comprising determining evidence of the expression levels of at least live of said genes, or their expression products.

32. The method of claim 22 or 23 further comprising the step of creating a report summarizing said IBD detection.

33. The method of claim 22 or 23, wherein said IBD is ulcerative colitis.

34. The method of claim 22 or 23, wherein said IBD is Crohn's disease.

35. The method of claim 22 or 23, wherein said IBD is ulcerative colitis and Crohn's disease.

36. The method of claim 22 or 23, wherein said test sample is from a colonic tissue biopsy.

37. The method of claim 36, wherein said biopsy is from a tissue selected from the group consisting of the terminal ileum, the ascending colon, the descending colon, and the sigmoid colon.

38. The method of claim 36, wherein said biopsy is from an inflamed colonic area.

39. The method of claim 36, wherein said biopsy is from a non-inflamed colonic area.

40. The method of claim 22 or 23, wherein said determining step is indicative of a recurrence of an IBD in said mammalian subject, and wherein said mammalian subject was previously diagnosed with an IBD and treated for said previously diagnosed IBD.

41. The method of claim 40, wherein said treatment comprised surgery.

42. The method of claim 22 or 23, wherein said determining step is indicative of a flare-up of said IBD in said mammalian subject.

43. The method of claim 22 or 23, wherein said IBD therapeutic agent is an aminosalicylate.

44. The method of claim 22 or 23, wherein said IBD therapeutic agent is a corticosteroid.

45. The method of claim 22 or 23, wherein said IBD therapeutic agent is an immunosuppressive agent.
